United States Patent Application Publication US 2007/0020637 A1 - sequence listing, part 4

SEQ ID NO: 2273 - protein, 164 aa, Homo sapiens [sequence omitted]

SEQ ID NO: 2274 - protein, 121 aa, Homo sapiens
MPLSRRSGDSPAPRIPGWRDASRPRGLVARAGRRTRRRALPGLAWACSEPGCFSVTTQIGGIWRFCGSPAAKLRGRRGLEACTTCSPRPSMHPGWNAVVQTRLAAAFTSWAQALLPPQPCK

SEQ ID NO: 2275 - protein, 197 aa, Homo sapiens [sequence omitted]

SEQ ID NO: 2276 - protein, 108 aa, Homo sapiens
MQFEFMIESILYARDAWLKEDGVIWPTMAALHLVPCSADKDYRSKVLFWDNAYEFNLSALKSLAVKEFFSKPKYNHILKPEDCLSEPCTILQLDMRTVQISDLEVRKR

SEQ ID NO: 2277 - protein, 213 aa, Homo sapiens
MDRRKGDRTLPVRTPTMAGGLFSIDRNYFEEIGTYDAGMDIWGGENLEMSFRIWQCGGSLEIVTCSHVGHVFRKATPYTFPGGTGHVINKNNRRLAEVWMDEFKDFFYIISPGVVKVDYGDVSVRKTLRENLKCKPFSWYLENIYPDSQIPRRYYSLGEIRNVETNQCLDNMGRKENEKVGIFNCHGMGGNQTQWTCNHVKMPPYERKSVMGI

SEQ ID NO: 2278 - protein, 352 aa, Homo sapiens
MKNWRLSSWLWSGASPQPWRSSKAKPRPEAPHPGLETTLQERLALYQTAIESARQAGDSAKMRRYDRGLKTLENLLASIRKGNAIDEADIPPPVAIGKGPASTPTYSPAPTQPAPRIASAPEPRVTLEGPSATAPASSPGLAKPQMPPGPCSPGPLAQLQSRQRDYKLAALHAKQQGDTTAAARHFRVAKSFDAVLEALSRGEPVDLSCLPPPPDQLPPDPPSPPSQPPTPATAPSTTEVPPPPRTLLEALEQRMERYQVAAAQAKSKGDQRKARMHERIVKQYQDAIRAHKAGRAVDVAELPVPPGFPPIQGLEATKPTQQSLVGVLETAMKLANQDEGPEDEEDEVPKKV

SEQ ID NO: 2279 - protein, 148 aa, Homo sapiens [sequence omitted]

SEQ ID NO: 2280 - protein, 571 aa, Homo sapiens
MAPSLRHSVQQFHHHPSTALHGESVAHSPRFSPNPPQQGAVRPQTLNFSSRSQTVPSPTINNSGQYSRYPYSNLNQGLVNNTGMNQNLGLTNNTPMNQSVPRYPNAVGFPSNSGQGLMHQQPIHPSGSLNQMNTQTMHPSQPQGTYASPPPMSPMKAMSNPAGTPPPQVRPGSAGIPMEVGSYPNIPHPQPSHQPPGAMGIGQRNMGPRNMQQSRPFIGMSSAPRELTGHMRPNGCPGVGLGDPQAIQERLIPGQQHPGQQPSFQQLPTCPPLQPHPGLHHQSSPPHPHHQPWAQLHPSPQNTPQKVPVHQHSPSEPFLEKPVPDMTQVSGPNAQLVKSDDYLPSIEQQPQQKKKKKKNNHIVAEDPSKGFGKDDFPGGVDNQELNRNSLDGSQEEKKKKKRSKAKKDPKEPKEPKEKKEPKEPKTPKAPKIPKEPKEKKAKTATPKPKSSKKSSNKKPDSEASALKKKVNKGKTEGPENSDLDKTPPPSPPPEEDEDPGVQKRRSSRQVKRKRYTEDLEFKISDEEADDADAAGRDSPSNTSQSEQQESVDAEGPVVEKIMSSRSVKKKK

SEQ ID NO: 2281 - protein, 139 aa, Homo sapiens [sequence omitted]

SEQ ID NO: 2282 - protein, 133 aa, Homo sapiens [sequence omitted]

SEQ ID NO: 2283 - protein, 453 aa, Homo sapiens
MLHRDSTISNESSQSCSSGRQNIRLHSDSSSSTQVFESVDEVEQVEAEGRLEEKQPKIPNGNLVNGTCSPDSGHPSSHNFSSGLSEHSEPSLSTEDSVLDAQRNTPTVLRPRDGSVDDRQSSEATTSQDEAPREELAVQDSLESDLLANESMDEFMSITGSLDMALPEKDDVVMEGWRSSETEKHGQADSEDNLSEEPEMESLFPALASLAVTTSANEVSPVSSSGVTYSPELLDLYTVNLHRIEKDVQRCDRNYWYFTPANLEKLRNIMCSYIWQHIEIGYVQGMCDLLAPLLVILDDEALAFSCFTELMKRMNQNFPHGGAMDTHFANMRSLIQILDSELFELMHQNGDYTHFYFCYRWFLLDFKRELVYDDVFLVWETIWAAKHVSSAHYVLFIALALVEVYRDIILENNMDFTDIIKFFNEMAERHNTKQVLKLARDLVYKVQTLIENK

SEQ ID NO: 2284 - protein, 213 aa, Homo sapiens [sequence omitted]

SEQ ID NO: 2285 - protein, 191 aa, Homo sapiens [sequence omitted]

SEQ ID NO: 2286 - protein, 330 aa, Homo sapiens
MAKADPTCNSTFLHLDTQGCYSGPCPEECVWSSWSSWTRCSCRVLVQQRYRHQGPASRGARAGAPCTRLDGHFRPCLISNCSEDSCTPPFEFHACGSPCAGLCATHLSHQLCQDLPPCQPGCYCPKGLLEQAGGCIPPEECNCWHTSAAGAGMTLAPGDRLQLGCKECECQRGELHCTSQGCQGLLPLSEWSEWSPCGPCLPPSALAPASRTALEEHWLRDPTGLSPTLAPLLASEQHRHRLCLDPATGRPWTGAPHLCTAPLSQQRLCPDPGACPDSCQWSLWGPWSPCQVPCSGGFRLRWREAEALCGGGFREPWAQDRKLQRRALPR

SEQ ID NO: 2287 - protein, 250 aa, Homo sapiens
MLVRSVGLFLVGLLLGLLLAAAALLGSAPYYQPGSVWGPLGLLLGGGLLCALLTLRWPRPLTTLATAVTGAALIATAADYFAELLLLGRYVVERLRAAPVPPLCWRSWALLALWPLLSLMGVLVQWRVTAEGDSHTEVVISRQRRRVQLMRIRQQEDRKEKRRKKRPPRAPLRGPRAPPRPGPPDPAYRRRPVPIKRFNGDVLSPSYIQSFRDRQTGSSLSSFMASPTDADYEYGSRGPLTACSGPPVRV

SEQ ID NO: 2288 - protein, 160 aa, Homo sapiens
MHGLREQFSHPRWPASLCLCFPALTPDVVHQSLFMSALSAHPDRSLSVCWEQHCKLLPGVAGISASTVAKWTIDEVFGFVQTLTGCEDQARLFKDEARIVRVTHVSGKTLVWTVAQLGDLVCSDHLQEGKGILETGVHSLLCSLPTHLLAKLSFASDSQY

SEQ ID NO: 2289 - protein, 109 aa, Homo sapiens [sequence omitted]

SEQ ID NO: 2290 - protein, 235 aa, Homo sapiens
MAREECKALLDGLNKTTACYHHLVLTVGGSADSQNLRQELQKTRQKAQELAVSTCARLTAVLRDRGLAADERAEFERLWVAFSGCLDLLEADMRRSLELGAAFPLHAPRRPLVRTGVAGASSGVAARALSTRSLRLEAEGDFDVADLRELEREVLQVGEMIDNMEMKVNVPRWTVQARQAAGAELLSTVSAGPSSVVSLQERGGGCDPRKALAAILFGAVLLAAVALAVCVAKLS

SEQ ID NO: 2291 - protein, 628 aa, Homo sapiens [sequence omitted]

SEQ ID NO: 2292 - protein, 160 aa, Homo sapiens
MAFLMKSMISNQVKNLGFGGGSEENKEEGGASDPAAAQGMTREEYEEYQKQMIEEKMERDAAFTQKKAERACLRVHLREKYRLPKSEMDENQIQMAGDDVDLPEDLRKMVDEDQEEEEDKDSILGQIQNLQNMDLDTIKEKAQATFTEIKQTAEQKCSVM

SEQ ID NO: 2293 - protein, 233 aa, Homo sapiens [sequence omitted]

SEQ ID NO: 2294 - protein, 229 aa, Homo sapiens
MSSLAYGTLGDLSQYKEVRLASWKSEPQGASFLLCRVQSGPGSGCSALVFCGSRCPLLFVSGNMASGVAVSDGVIKVFNDMKVRKSSTPEEVKKRKKAVLFCLSEDKKNIILEEGKEILVGDVGQTVDDPYATFVKMLPDKDCRYALYDATYETKESKKEDLVFIFWAPESAPLKSKMIYASSKDAIKKKLTGIKHELQANCYEEVKDRCTLAEKLGGSAVISLEGKPL

SEQ ID NO: 2295 - protein, 138 aa, Homo sapiens [sequence omitted]

SEQ ID NO: 2296 - protein, 225 aa, Homo sapiens [sequence omitted]

SEQ ID NO: 2297 - protein, 248 aa, Homo sapiens [sequence omitted]

SEQ ID NO: 2298 - protein, 221 aa, Homo sapiens
MGSALRGLGSATFSSSPVTHSSRVGGVLPAPPRGLGISPSPCPGDSLALSRTASLLGLSLGTQWTPKSRPAPTTGPASLCLPQLAWVLAWVRIWKLLAGLNQALLSSSRALSHRRQRPAASRPHCQQCPWPSEPRRSSTPSRPSSTPPRPAGQGQALPQILIGREALLTFPPGGRGWSESPHSRETHRSPLNFADAHLENGLSCTRPSHTTALQADGMFQL

SEQ ID NO: 2299 - protein, 101 aa, Homo sapiens
MLPRSQSLCYSLPQAILSPWPPKVLSLQVSTTVASHALVLRSRIFLFGAFTISFRLGDREPTKQPFRGWKKSLEKELCGFRNFSRKSSRAEKENLPNGRVY

SEQ ID NO: 2300 - protein, 277 aa, Homo sapiens
MEENQRVARRRRFPFVRERSDSTGSSSVYFTASSGATFTDAESEGGYTTANAESDNERDSDKESEDGEDEVSCETVKMGRKDSLDLEEEAASGASSALEAGGSSGLEDVLPLLQQADELHRGDEQGKREGFQLLLNNKLVYGSRQDFLWRLARAYSDMCELTEEVSEKKSYALDGKEEAEAALEKGDESADCHLWYAVLCGQLAEHESIQRRIQSGFSFKEHVDKAIALQPENPMAHFLLGRWCYQVSHLSWLEKKLLQPCLKALSVPLWKMPSRAS

SEQ ID NO: 2301 - protein, 330 aa, Homo sapiens [sequence omitted]

SEQ ID NO: 2302 - protein, 113 aa, Homo sapiens
MKILLGGVTNVFMHIQDTLVSTGCTAVIHPHLLKMHPDLSPHLHTEECNVLINLLKECHKNHNILKFFGYCNDVDRELRKCLKNEYVENRTKSREHGIAMRKKLFNPPEESEK

SEQ ID NO: 2303 - protein, 215 aa, Homo sapiens [sequence omitted]

SEQ ID NO: 2304 - protein, 107 aa, Homo sapiens
MELLDPDELRGEAGYYLTTWFGALHHIAHYQPETDRAPRGLSSEARASLHQWHRRRTLHRKDHPRAQVTAHLAASRREGETWCPSDPAPTSPHRPTCPLRSHGQKRL

SEQ ID NO: 2305 - protein, 127 aa, Homo sapiens
MILKKGPHFPGEADPRCVVGSPGAGDRRCACAAAGTGASRLGVARGVPGQPGPHPGPLVPCPSSLPILPHLPSTTVAAAGSASATGAAARRCRCGACALWTPCGSARSAPWCPSRRRSSTTSSSKCS

SEQ ID NO: 2306 - protein, 131 aa, Homo sapiens
MVAAYAGHIDCVRELVLQGADINLQREDGGTALLAASQYGHMQVVETLLKHGANIHDQLYDGATALFLAAQGGYLDVIRLLLASGAKVNQPRTGQRPCGSRPRWATARWCGCCCCAEPTATLRGTMAQQHY

SEQ ID NO: 2307 - protein, 190 aa, Homo sapiens [sequence omitted]

SEQ ID NO: 2308 - protein, 180 aa, Homo sapiens
MLEDPVALKACLLHICLQSQTSGPGAVSSLVSGIPVASMFCVCVWCAPSSHCLNSLKSHKGGLLLEIWPPLAPPRSPHVSPTGSPQTTSEGLTCCHSLLLPQSRVMRMDGVQGFRWGLRRCPCWPCPSWLSRPGFTVQLHLYAGRGADSSGTPWFWIPFLGSLWRQPGFSGAASQQLSQG

SEQ ID NO: 2309 - protein, 1015 aa, Homo sapiens
MAQGEAQWFQEAKNLNEQLRAAYTSASFRHMSLLDISSDLATDHLLGCDLSIASKHISKPVQEPLVLPEVFGNLNSVMCVEGEAGSGKTVLLKKIAFLWASGCCPLLNRFQLVFYLSLSSTRPDEGLASIICDQLLEKEGSVTEMCMRNIIQQLKNQVLFLLDDYKEICSIPQVIGKLIQKNHLSRTCLLIAVRTNRARDIRRYLETILEIKAFPFYNTVCILRKLFSHNMTRLRKFMVYFGKNQSLQKIQKTPLFVAAICAHWFQYPFDPSFDDVAVFKSYMERLSLRNKATAEILKATVSSCGELALKGFFSCCFEFNDDDLAEAGVDEDEDLTMCLMSKFTAQRLRPFYRFLSPAFQEFLAGMRLIELLDSDRQEHQDLGLYHLKQINSPIMTVSAYNNFLNYVSSLPSTKAGPKIVSHLLHLVDNKESLENISENDDYLKHQPEISLQMQLLRGLWQICPQAYFSMVSEHLLVLALKTAYQSNTVAACSPFVLQFLQGRTLTLGALNLQYFFDHPESLSLLRSIHFPIRGNKTSPRAHFSVLETCFDKSQVPTIDQDYASAFEPMNEWERNLAEKEDNVKSYMDMQRRASPDLSTGYWKLSPKQYKIPCLEVDVNDIDVVGQDMLEILMTVFSASQRIELHLNHSRGFIESIRPALELSKASVTKCSISKLELSAAEQELLLTLPSLESLEVSGTIQSQDQIFPNLDKFLCLKELSVDLEGNINVFSVIPEEFPNFHHMEKLLIQISAEYDPSKLVKLIQNSPNLHVFHLKCNFFSDFGSLMTMLVSCKKLTEIKFSDSFFQAVPFVASLPNFISLKILNLEGQQFPDEETSEKFAYILGSLSNLEELILPTGDGIYRVAKLIIQQCQQLHCLRVLSFFKTLNDDSVVEIAKVAISGGFQKLENLKLSINHKITEEGYRNFFQALDNMPNLQELDISRHFTECIKAQATTVKSLSQCVLRLPRLIRLNMLSWLLDADDIALLNVMKERHPQSKYLTILQKWILPFSPIIQK

SEQ ID NO: 2310 - protein, 259 aa, Homo sapiens
MQFLHKLILNHNPLTTVEDPYLFKLPALKYLDMGTTLVPLTTLKNILMMTVELEKLILPSHMACCLCQFKNSIEAVCKTVKLHCNSACLTNTTHCPEEASVGNPEGAFMKVLQARKNYTSTELIVEPEEPSDSSGINLSGFGSEQLDTNDESDFISTLSYILPYFSAVNLDVKSLLLPLIKLPTTGNSLAKIQTVGQNRQRVKRVLMGPRSIQKRHFKEVGRQSIRREQGAQASVENAAEEKRLGSPAPTEEEESEALP

SEQ ID NO: 2311 - protein, 110 aa, Homo sapiens
MATSDPPQSLDTSLFFGTVAMKNSSPEPQALTPSSKLTVDTDALTPSSTLCENSVSELLTPTKAEWNVHPDSDFFGQEGETQFGFPNAAGNHGSQKETDLITVTGSSFLV

SEQ ID NO: 2312 - protein, 105 aa, Homo sapiens
MKMSFFERLRSATWKPVPDSHQGPAFYCGTLKAGPSPKDTFLSLLNWNYGFVFINGRNLGRYWNIGPQKTLYLPGVWLHPEDNEVILFEKMMSGSDIKSTDKPTP

SEQ ID NO: 2313 - protein, 567 aa, Homo sapiens [sequence omitted]

SEQ ID NO: 2314 - protein, 314 aa, Homo sapiens [sequence omitted]

SEQ ID NO: 2315 - protein, 200 aa, Homo sapiens
MAQQRALPQSKETLLQSYNKRLKDDIKSIMDNFTEIIKTAKIEDETQVSRATQGEQDNYEMHVRAANIVRAGESLMKLVSDLKQFLILNDFPSVNEAIDQRNQQLRTLQEECDRKLITLRDEISIDLYELEEEYYSSSSSLCEANDLPLCEAYGRLDLDTDSADGLSAPLLASPEPSAGPLQVAAPAHSHAGGPGPTEHA

SEQ ID NO: 2316 - protein, 102 aa, Homo sapiens
MTTATPLGDTTFFSLNMTTRGEDFLYKSSGAIVAAVVVVVIIIFTVVLILLKMYNRKMRTRRELEPKGPKPTAPSAVGPNSNGSQHPATVTFSPVDVQVETR

SEQ ID NO: 2317 - protein, 133 aa, Homo sapiens
MVMLEDSNSSTGCGARNCVECLVFLSVLGCQSERKGQMRTQQAGRWLRAGREASSETNPEGTLILDFQSPELPLAARGWQEHEPVVRCNVLPHAFSSWCFGQNFPKWSETQELRNRVTVKRWEIISCENSGRK

SEQ ID NO: 2318 - protein, 224 aa, Homo sapiens
MYRPATALGSNRAVQLLLETSADNQHYYCDSLKACLVTTVTSSGPSQSTIKLVATNMIANGKLAEGVQLLCLIDKAADACRYLQTYGEWNRAAWLAKVRLNPEECADVLRRWVDHLCSPQVNQKSKALLVLLSLGCFFSVAETLHSMRYFDRAALFVEACLKYGAFEVTEDTEKLITAIYADYARSSKNLGFKQGAVLFASKAGAAGKDLLNELESPKEEPIEE

SEQ ID NO: 2319 - protein, 111 aa, Homo sapiens [sequence omitted]

SEQ ID NO: 2320 - protein, 733 aa, Homo sapiens
MPAETDECRLNQNICGHGECVPGPPDYSCYCNPGYRSHPQHRYCVDVNECEAEPCGPGRGICMNTGGSYNCHCNRGYRLHVGAGGRSCVDLNECAKPHLCGDGGFCINFPGHYKCNCYPGYRLKASRPPVCEDIDECRDPSSCPDGKCENKPGSFKCIACQPGYRSQGGGACRDVNECAEGSPCSPGWCENLPGSFRCTCAQGYAPAPDGRSCLDVDECEAGDVCDNGICSNTPGSFQCQCLSGYHLSRDRSHCEDIDECDFPAACIGGDCINTNGSYRCLCPQGHRLVGGRKCQDIDECSQDPSLCLPHGACKNLQGSYVCVCDEGFTPTQDQHGCEEVEQPHHKKECYLNFDDTVFCDSVLATNVTQQECCCSLGAGWGDHCEIYPCPVYSSAEFHSLCPDGKGYTQDNIIVNYGIPAHRDIDECMLFGSEICKEGKCVNTQPGYECYCKQGFYYDGNLLECVDVDECLDESNCRNGVCENTRGGYRCACTPPAEYSPAQRQCLSPEEMDVDECQDPAACRPGRCVNLPGSYRCECRPPWVPGPSGRDCQLPESPAERAPERRDVCWSQRGEDGMCAGPLAGPALTFDDCCCRQGRGWGAQCRPCPPRGAGSHCPTSQSESNSFWDTSPLLLGKPPRDEDSSEEDSDECRCVSGRCVPRPGGAVCECPGGFQLDASRARCVDIDECRELNQRGLLCKSERCVNTSGSFRCVCKAGFARSRPHGACVPQRRR

SEQ ID NO: 2321 - protein, 841 aa, Homo sapiens
MTVLEQDTQGLDGWWLCSLHGRQGIVPGNRLKILVGMYDKKPAGPGSGPPATPAQPQPGLHAPAPPASQYTPMLPNTYQPQPDSVYLVPTPSKAQQGLYQVPGPSPQFQSPPAKQTSTFSKQTPHHPFPSPATDLYQVPPGPGGPAQDIYQVPPSAGMGHDIYQVPPSMDTRSWEGTKPPAKVVVPTRVGQGYVYEAAQPEQDEYDIPRHLLAPGPQDIYDVPPVRGLLPSQYGQEVYDTPPMAVKGPNGRDPLLEVYDVPPSVEKGLPPSNHHAVYDVPPSVSKDVPDGPLLREETYDVPPAFAKAKPFDPARTPLVLAAPPPDSPPAEDVYDVPPPAPDLYDVPPGLRRPGPGTLYDVPRERVLPPEVADGGVVDSGVYAVPPPAEREAPAEGKRLSASSTGSTRSSQSASSLEVAGPGREPLELEVAVEALARLQQGVSATVAHLLDLAGSAGATGSWRSPSEPQEPLVQDLQAAVAAVQSAVHELLEFARSAVGNAAHTSDRALHAKLSRQLQKMEDVHQTLVAHGQALDAGRGGSGATLEDLDRLVACSRAVPEDAKQLASFLHGNASLLFRRTKATAPGPEGGGTLHPNPTDKTSSIQSRPLPSPPKFTSQDSPDGQYENSEGGWMEDYDYVHLQGKEEFEKTQKELLEKGSITRQGKSQLELQQLKQFERLEQEVSRPIDHDLANWTPAQPLAPGRTGGLGPSDRQLLLFYLEQCEANLTTLTNAVDAFFTAVATNQPPKIFVAHSKFVILSAHKLVFIGDTLSRQAKAADVRSQVTHYSNLLCDLLRGIVATTKAAALQYPSPSAAQDMVERVKELGHSTQQFRRVLGQLAAA

SEQ ID NO: 2322 - protein, 113 aa, Homo sapiens [sequence omitted]

SEQ ID NO: 2323 - protein, 257 aa, Homo sapiens
MPGGVQGSGLTRPRGHPQDDLWPRVTPFCPAGQHIYLSARIDGNLVVRPYTPISSDDDKGFVDLVIKVYFKDTHPKFPAGGKMSQYLESMQIGDTIEFRGPSGLLVYQGKGKFAIRPDKKSNPIIRTVKSVGMIAGGTGITPMLQVIRAIMKDPDDHTVCHLLFANQTEKDILLRPELEELRNKHSARFKLWYTLDRAPEAWDYGQGFVNEEMIRDHLPPPEEEPLVLMCGPPPMIQYACLPNLDHVGHPTERCFVF

SEQ ID NO: 2324 - protein, 100 aa, Homo sapiens
MAGGKGAKQIFPTFYLANLSFAAVMCQVLGCWGIPSEQSLFSTLEELREKEIDNYCVMRLQTEGLASAHPSWASRGHCSITTRPCTPASPPSPSWAWAPL

SEQ ID NO: 2325 - protein, 449 aa, Homo sapiens
MMLGTEGGEGFVVKVRGLPWSCSADEVQRFFSDCKIQNGAQGIRFIYTREGRPSGEAFVELESEDEVKLALKKDRETMGHRYVEVFKSNNVEMDWVLKHTGPNSPDTANDGFVRLRGLPFGCSKEEIVQFFSGLEIVPNGITLPVDFQGRSTGEAFVQFASQEIAEKALKKHKERIGHRYIEIFKSSRAEVRTHYDPPRKLMAMQRPGPYDRPGAGRGYNSIGRGAGFERMRRGAYGGGYGGYDDYNGYNDGYGFGSDRFGRDLNYCFSGMSDHRYGDGGSTFQSTTGHCVHMRGLPYRATENDIYNFFSPLNPVRVHIEIGPDGRVTGEADVEFATHEDAVAAMSKDKANMQHRYVELFLNSTAGASGGAYEHRYVELFLNSTAGASGGAYGSQMMGGMGLSNQSSYGGPASQQLSGGYGGGYGGQSSMSGYDQVLQENSSDFQSNIA

SEQ ID NO: 2326 - protein, 109 aa, Homo sapiens [sequence omitted]

SEQ ID NO: 2327 - protein, 152 aa, Homo sapiens [sequence omitted]

SEQ ID NO: 2328 - protein, 229 aa, Homo sapiens
MNHEWIGNEWLPSLGLPQYRSYFMECLVDARMLDHLTKKDLRVHLKMVDSFHRTSLQYGIMCLKRLNYDRKELEKRREESQHEIKDVLVWTNDQVVHWVQSIGLRDYAGNLHESGVHGALLALDENFDHNTLALILQIPTQNTQARQVMEREFNNLLALGTDRKLDDGDDKVFRRAPSWRKRFRPREHHGRGGMLSASAETLPAGFRVSTLGTLQPPPAPPKKIMPEGE

SEQ ID NO: 2329 - protein, 170 aa, Homo sapiens
MNRLLFFKSQGLALLPRLKCSGAIIAHCNFELLGSSNFPDLASERAGTTAFGTVVLIRLSNHIAMLWDFWRRKQTIWSTRTLNHHHLVSCISFIIIFETESHSVTQAGVQWCNLSSLQPPPPGFKRFSCLTLPTSWDYMQMPPCLANFCIFSRDGVSPYWPGWSRTPDCR

SEQ ID NO: 2330 - protein, 105 aa, Homo sapiens [sequence omitted]

SEQ ID NO: 2331 - protein, 256 aa, Homo sapiens
MTLSAWGLSSVTLSAWGLSSVTLSAWGLSSVTLSAWGLSSVTLSAWGLSSVTLSAWGLSSVTLSACGLSSVTLSAWGLSSVTLSAWGLSSVTLSAWGLSSVTLSAWGLSSVTLSACCLSSMTLSACGLSSTTLFACRLSSVTVSTCSLSSVTLSACGLSRVTLSACGLSSMTPSACGLSRVTLSACHLSSMTVSTCGLSSMTLFACGLSSMTLSACRLSNVTLSNFPLASAPGEVAFSLPCCLLFSCKVSSDFLYP

SEQ ID NO: 2332 - protein, 255 aa, Homo sapiens
MPVESVGAMEPLPGALQWGVQATLERGRGPLWRRLPGAMGSRQKAATEGPAQVRAARPKTLYSPWTVPTSAHTAVPTSGTAFSVCRDPAAQAAAVPLASWSRMGAVCRSPLAAVASPVPMPLGSWPRPRRCSWTAKTAPVSTSPWCAHTRSVQSLGLGQPGAVARPPVVGALWSDVGLVRGVLGWHHARPRTQSNGRSVTCSPALSAPLARCLVPVPPHARASAGICSLVPSVCRSPASLAVAALEGRWVRGAVS

SEQ ID NO: 2333 - protein, 139 aa, Homo sapiens
MARAGVDVGLGEEGAHGRAPHLPGGLLGCFLWEQLVHVPARPSPSGIRRGFSWTLWPPPPPRARVKEHPSPLVTETKRSGPSRQVKVQDAASPRLLPEGGVEPPRAPDRAAARAFAGFFPLHPLLIKVGSLHDNRSERG

SEQ ID NO: 2334 - protein, 134 aa, Homo sapiens [sequence omitted]

SEQ ID NO: 2335 - protein, 108 aa, Homo sapiens [sequence omitted]

SEQ ID NO: 2336 - protein, 142 aa, Homo sapiens [sequence omitted]

SEQ ID NO: 2337 - protein, 123 aa, Homo sapiens
MSACPAGTAQRPRPGRTLRVTTLPTAPLAILPNHSLPKIPPTVTPHDNPGRLSAVAPAPQPRALSPPRFCPPPLSSLCTSPPWLPLSPELTVDAGFFQTPLGNTEWKRGSVRKCLVECRHCGI

SEQ ID NO: 2338 - protein, 120 aa, Homo sapiens [sequence omitted]

SEQ ID NO: 2339 - protein, 273 aa, Homo sapiens
MEGEIWGLATHPSKDLFISASNDGTARIWDLADKKLLNKVSLGHAARCAAYSPDGEMVAIGMKNGEFVILLVNSLKVWGKKRDRKSAIQDIRISPDNRFLAVGSSEHTVDFYDLTQGTNLNRIGYCKDIPSFVIQMDFSADGKYIQVSTGAYKRQVHEVPLGKQVTEAVVIEKITWASWTSVLGDEVIGIWPRNADKADVNCACVTHAGLNIVTGDDFGLVKLFDFPCTEKFAKHKRYFGHSAHVTNIRFSYDDKYVVSTGGDDCSVFVWRCL

SEQ ID NO: 2340 - protein, 103 aa, Homo sapiens
MQQNEAAQQEVPFGPQTTAVLWDHKGGVAHAVNHQANGSVHLLHQDGVPLVVIHMALGGKVSIETTQTVVFQLGHSTGQLQRKSKQPSAKPRSPCKPAKRLPV

SEQ ID NO: 2341 - protein, 127 aa, Homo sapiens
MGVPRSFRGSPRVPPPGPPRWTSLRPLPSLDHISAPTVPDILALHATSRPMIMPQFPSPLRQPSPCRLPPSERVQLQLSPGSLPASGPHLTPASRFPLPARLNPAASAPCLVPSAWPLPPAAGSGRR

SEQ ID NO: 2342 - protein, 289 aa, Homo sapiens
MGCIGSRTVGNEVIAVDWKGLKDVDQINMDSTSSLHGSSLHRPSTEQTRTDFSWDGINLSMEDTTSILPKLKRNSNAYGIGALAKSSFSGISRSMKDHVTKPTAMGQGRVAHMIEWQGWGKTPAVQPQHSHESVRRDTDAYSDLSDGEKEARFLAGVMEQFAISEATLMAWSSMDGEDMSVNSTQEPLGCNYSDNYQELMDSQDALAQAPMDGLTLTCPRVCTVWGRQMPGKPAISPSLPLRPQDPILGLHLMTHNPACMKWDLPNQLQDTLLWSLHLCWGETLTGLRG

SEQ ID NO: 2343 - protein, 118 aa, Homo sapiens [sequence omitted]

SEQ ID NO: 2344 - protein, 1005 aa, Homo sapiens
MEKQRALVAAKDGDVATLERLLEAGALGPGITDALGAGLVHHATRAGHLDCVKFLVQRAQLPGNQRAHNGATPAHDAAATGSLAELCWLVREGGCGLQDQDASGVSPLHLAARFGHPVLVEWLLHEGHSATLETREGARPLHHAAVSGDLTCLKLLTAAHGSSVNRRTRSGASPLYLACQEGHLHLAQFLVKDCGADVHLRALDGMSALHAAAARGHYSLVVWLVTFTDIGLTARDNEGATALHFAARGGHTPILDRLLLMGTPILRDSWGGTPLHDAAENGQMECCQTLVSHHVDPSLRDEDGYTAADLAEYHGHRDCAQYLREVAQPVPLLMTPPPPPFPPPPLLATRRSLEDGRRGGPGPGNPSPMSLSPAWPGHPDQPLPREQMTSPAPPRIITSATADPEGTETALAGDTSDGLAALQLDGLPSGDIDGLVPTRDERGQPIPEWKRQVMVRKLQARLGAESSAEAQDNGGSSGPTEQAAWRYSQTHQAILGPFGELLTEDDLVYLEKQIADLQLRRRCQEYESELGRLAAELQALLPEPLVSITVNSHFLPRAPGLEVEEASIPAAEPAGSAEASEVAPGVQPLPFWCSHISRLVRSLSLLLKGMHGLVQGDEKPSTRPLQDTCREASASPPRSEAQRQIQEWGVSVRTLRGNFESASGPLCGFNPGPCEPGAQHRQCLSGCWPALPKPRSGLASGEPRPGDTEEASDSGISCEEVPPEAGAAAGPDLASLRKERIIMLFLSHWRRSAYTPALKTAACRTLGARHAGLRGQEAARSPGPPSPPSEGPRLGHLWQQRSTITHLLGNWKAIMAHVPARQLRRLSRQPRGALSPEQFLPHVDGAPVPYSSLSLDLFMLGYFQLLECDLPAEERKLRHLLCFEVFEHLGTHGWEAVRAFHKAVTDEVAAGRRAWTDGFEDIKARFFGSSQRPAWDTEPGRKSGLTLLGPLPHATVPCSGPEPTAQRLGSRSQQGSFNGEDICGYINRSFAFWKEKEAEMFNFGE

SEQ ID NO: 2345 - protein, 145 aa, Homo sapiens
MGPWPRDWLGKGWRLGSCEARAGAKEVSVIRHGAPNPAQSHLHVQARAQVHSEDGHSLPPVVDGEDEVLSLLVFVQDSQECCRQAVQGRQGRGVTWGLGLPSYHLRTLLSPVCVPARDQRAPRKCCEAVLACPLVETLVTTLLTR

SEQ ID NO: 2346 - protein, 173 aa, Homo sapiens [sequence omitted]

SEQ ID NO: 2347 - protein, 116 aa, Homo sapiens
MGFHHVGQAGLELLTSGDLPLLASQSAGITVMSHRTWPQTFFFLSKEIVSWITSHKASQYVKQIIVLEVTTWNSVHGDSSPCTPHTETLQLMLPTSVSKETLDKSSPFIHRWRHYC

SEQ ID NO: 2348 - protein, 122 aa, Homo sapiens [sequence omitted]

SEQ ID NO: 2349 - protein, 1163 aa, Homo sapiens
MERGAREMAAPGDCPAGKAAGTSRPTRSLSTAQLVQPSGGLQASVISNIVLMKGQAKGLGFSIVGGKDSIYGPIGIYVKTIFAGGAAAADGRLQEGDEILELNGESMAGLTHQDALQKFKQAKKGLLTLTVRTRLTAPPSLCSHLSPPLCRSLSSSTCITKDSSSFALESPSAPISTAKPNYRIMVEVSLQKEAGVGLGIGLCSVPYFQCISGIFVHTLSPGSVAHLDGRLRCGDEIVEISDSPVHCLTLNEVYTILSHCDPGPVPIIVSRHPDPQVSEQQLKEAVAQAVENTKFGKERHQWSLEGVKRLESSWHGRPTLEKEREKNSAPPHRRAQKVMIRSSSDSSYMSGSPGGSPGSGSAEKPSSDVDISTHSPSLPLAREPVVLSIASSRLPQESPPLPESRDSHPPLRLKKSFEILVRKPMSSKPKPPPRKYFKSDSDPQKSLEERENSSCSSGHTPPTCGQEARELLPLLLPQEDTAGRSPSASAGCPGPGIGPQTKSSTEGEPGWRRASPVTQTSPIKHPLLKRQARMDYSFDTTAEDPWVRISDCIKNLFSPIMSENHGHMPLQPNASLNEEEGTQGHPDGTPPKLDTANGTPKVYKSADSSTVKKGPPVAPKPAWFRQSLKGLRNRASDPRGLPDPALSTQPAPASREHLGSHIRASSSSSSIRQRISSFETFGSSQLPDKGAQRLSLQPSSGEAAKPLGKHEEGRFSGLLGRGAAPTLVPQQPEQVLSSGSPAASEARDPGVSESPPPGRQPNQKTLPPGPDPLLRLLSTQAEESQGPVLKMPSQRARSFPLTRSQSCETKLLDEKTSKLYSISSQVSSAVMKSLLCLPSSISCAQTPCIPKEGASPTSSSNEDSAANGSAETSALDTGFSLNLSELREYTEGLTEAKEDDDGDHSSLQSGQSVISLLSSEELKKLIEEVKVLDEATLKQLDGIHVTILHKEEGAGLGFSLAGGADLENKVITVHRVFPNGLASQEGTIQKGNEVLSINGKSLKGTTHHDALAILRQAREPRQAVIVTRKLTPEAMPDLNSSTDSAASASAASDVSVESTEATVCTVTLEKMSAGLGFSLEGGKGSLHGDKPLTINRIFKGAASEQSETVQPGDEILQLGGTAMQGLTRFEAWNIIKALPDGPVTIVIRRKSLQSKETTAAGDS

SEQ ID NO: 2350 - protein, 306 aa, Homo sapiens
MSNKRSNSFRQAILQGNRRLSSKALLEEKGLSLSQRLIRHVAYETLPREIDRKWYYDSYTCCPPPWFMITVTLLEVAFFLYNGVSLGQFVLQVTHPRYLKNSLVYHPQLRAQVWRYLTYIFMHAGIEHLGLNVVLQLLVGVPLEMVHGATRIGLVYVAGVVAGSLAVSVADMTAPVVGSSGGVYALVSAHLANIVMNWSGMKCQFKLLRMAVALICMSMEFGRAVWLRFHPSAYPPCPHPSFVAHLGGVAVGITLGVVVLRNYEQRLQDQSLWWIFVAMYTVFVLFAVFWNIFAYTLLDLKLPPPP

SEQ ID NO: 2351 - protein, 178 aa, Homo sapiens
MVGFPNAGKSSLLRAISNARPAVASYPFTTLKPHVGIVHYEGHLQIAVADIPGIIRGAHQNRGLGSAFLRHIERCRFLLFVVDLSQPEPWTQVDDLKYELEMYEKGLSARPHAIVANKIDLPEAQANLSQLRDHLGQEVIVLSALTGENLEQLLLHLKVLYDAYAEAELGQGRQPLRW

SEQ ID NO: 2352 - protein, 143 aa, Homo sapiens
MYGATQSQSDMCDQDQCIQSTKFVLQAAATPLLQSEPSLTSDELHLPGKPGLGTPCASLTLGPPTPPASMPNLAEATLADVMPRKDEHMGHQFLTPDEAPSPPRLLAAGSPLAHSRTMHVLGLASQDSLHEDSVRGLVKLSSV

SEQ ID NO: 2353 - protein, 171 aa, Homo sapiens
MAFQSLDIFIINTNIPLHKGTSSNLRLEGPPAYVFLLILSYLPSSPHNSHSVTKSRRFYLLNLSYPSLLSHSPDTTINQATITSSCLTANASRLASAFPWPCDNLHSSQGPKQSLQKVHPNRSLNFQWLPLLCGLTMIKARPGVGAHACNPSTLGGRGGRITTLGDPDHSP

SEQ ID NO: 2354 - protein, 102 aa, Homo sapiens [sequence omitted]

SEQ ID NO: 2355 - protein, 127 aa, Homo sapiens
MPSCDPGPGPACLPTKTFRSYLPRCHRTYSCVHCRAHLAKHDELISKSFQGSHGRAYLFNSVVNVGCGPAEQRLLLTGLHSVADIFCESCKTTLGWKYEQAFETSQKYKEGKYIIEMSHMVKDNGWD

SEQ ID NO: 2356 - protein, 143 aa, Homo sapiens [sequence omitted]

SEQ ID NO: 2357 - protein, 115 aa, Homo sapiens
MGFYHVGQSGLELLSSRDLPASASQSAGIPGVSHCARPRLVIFKMGLKLRAGLQEENELRSDFRCWNPSASLPATLQFLAASSSFAVCPWFAVFVIRNLCYEISGIHWLLLSNFV

SEQ ID NO: 2358 - protein, 179 aa, Homo sapiens
MRKEAVPSRGLSCVRGGAAAVAGVSRHPTQGSFQIRHLFTRPPYSFFSPRLLHVGVQCLALTSPHSSWWGFELGVPSAPHSPLTAPTPRKPPLPPLFVSSFHSLGGQAAAPVAAPALFHPPLLSQPELYREVWAPHLGPCHACSQKHPRGSPDSLLPWALLRSPFIVAFGVCLMPIPCS

SEQ ID NO: 2359 - protein, 920 aa, Homo sapiens [sequence omitted]

SEQ ID NO: 2360 - protein, 293 aa, Homo sapiens [sequence omitted]

SEQ ID NO: 2361 - protein, 173 aa, Homo sapiens
MWVPAGQAIGGYGPPPAGRGAPPPPPPFTSYIVSTPPGGFPPPQGFPQGYGAPPQFSFGYGPPPPPPDQFAPPGVPPPPATPGAAPLAFPPPPSQAAPDMSKPPTAQPDFPYGQYAGYGQDLSGFGQGFSDPSQQPPSYGGPSVPGSGGPPAGGSGFGRGQNHNVQGFHPYRR

SEQ ID NO: 2362 - protein, 270 aa, Homo sapiens [sequence omitted]

SEQ ID NO: 2363 - protein, 119 aa, Homo sapiens
MRKKGSLPLGPALLMHVCAHACKPGTFSSRPPGLGQFLLLLPSPPTGCVLSNWNMRLYLQDWPHGGRVRSLFPVSRHRSLSLALPCFGASLVAPVRFSRLVAAQSGVRTCRGHAFLALT

SEQ ID NO: 2364 - protein, 242 aa, Homo sapiens
MPPGHTHSGSDSSDSEYSSQTTVSGLSEELRHYEAQQGAGGPAHQVIVEATENPVFAHSTVVHPESRHHPPSNPRQQPHLDSGSLPPGRQGQQPRRDPPREGLWPPPYRPRRDAFEISTEGHSGPSNRARWGPRGARSHNPRNPASTAMGSSVPGYCQPITTVTASASVTVAVHPPPVPGPGRNPRGGLCPGYPETDHGLFEDPTCLSTSGVRGGIRRWKSLSCRTWNARRGPGEAAPTEGD

SEQ ID NO: 2365 - protein, 945 aa, Homo sapiens
MAEGQGGGGQRWDWAGGGRAAEEEVVRRRCRRGEEAQVAQPWPEGSRGTAAGPPVEERFRQLHLRKQVSYRKAITKSGLQHLAPPPPTPGAPCSESERQIRSTVDWSESATYGEHIWFETNVSGDFCYVGEQYCVARMLKSVSRRKCAACKIVVHTPCIEQLEKINFRCKPSFRESGSRNVREPTFVRHHWVHRRRQDGKCRHCGKGFQQKFTFHSKEIVAISCSWCKQAYHSKVSCFMLQQIEEPCSLGVHAAVVIPPTWILRARRPQNTLKASKKKKRASFKRKSSKKGPEEGRWRPFIIRPTPSPLMKPLLVFVNPKSGGNQGAKIIQSFLWYLNPRQVFDLSQGGPKEALEMYRKVHNLRILACGGDGTVGWILSTLDQLRLKPPPPVAILPLGTGNDLARTLNWGGGYTDEPVSKILSHVEEGNVVQLDRWDLHAEPNPEAGPEDRDEGATDRLPLDVFNNYFSLGFDAHVTLEFHESREANPEKFNSRFRNKMFYAGTAFSDFLMGSSKDLAKHIRVVCDGMDLTPKIQDLKPQCVVFLNIPRYCAGTMPWGHPGEHHDFEPQRHDDGYLEVIGFTMTSLAALQVGGHGERLTQCREVVLTTSKAIPVQVDGEPCKLAASRIRIALRNQATMVQKAKRRSAAPLHSDQQPVPEQLRIQVSRVSMHDYEALHYDKEQLKEASVPLGTVVVPGDSDLELCRAHIERLQQEPDGAGAKSPTCQKLSPKWCFLDATTASRFYRIDRAQEHLNYVTEIAQDEIYILDPELLGASARPDLPTPTSPLPTSPCSPTPRSLQGDAAPPQGEELIEAAKRNDFCKLQELHRAGGDLMHRDEQSRTLLHHAVSTGSKDVVRYLLDHAPPEILDAVEENGETCLHQAAALGQRTICHYIVEAGASLMKTDQQGDTPRQRAEKAQDTELAAYLENRQHYQMIQREDQETAV

SEQ ID NO: 2366 - protein, 115 aa, Homo sapiens [sequence omitted]

SEQ ID NO: 2367 - protein, 217 aa, Homo sapiens
MASAGPNRPEISLARNSTCVGCPNNHSFSRTVAHGGRALASAWPPQAQFLPVGGRSRPGSCPSASSPGPELVPVGLSRPSSPGHLHGPSSCLTTTTFGPAPAQLLAAVVGPRLPCVQASRTHLRLSGGPERPGSCLPAASPGPAAASRRPPQATFPPASRQPRQARLPPAGGLLRRLISCPAAASPGQAPACRQAPQAQLLRPEGFSRPGSCLAAAS

SEQ ID NO: 2368 - protein, 196 aa, Homo sapiens [sequence omitted]

SEQ ID NO: 2369 - protein, 109 aa, Homo sapiens [sequence omitted]

SEQ ID NO: 2370 - protein, 283 aa, Homo sapiens [sequence omitted]

SEQ ID NO: 2371 - protein, 109 aa, Homo sapiens
MLLMSYGSLLVQLAHPPIHSLFDSQQLSVFSCCSSWFSSLFLVLFFSSFFSNFFSVLDCLSLMFCSFFLFFLETGSHSVTQDGVQWHDVGSLQSLPPKAQAILPSQPPK

SEQ ID NO: 2372 - protein, 372 aa, Homo sapiens
MDQYKFYDPSPPRRRGNWITLKMRKLIKSKKDINRERQKSLTLTPTRSDSSEGFLQLPHQDSQDSSSVGSNSLEDGQTLGTKKSSNTTSFEDISPQGVSDDSSTGSRVHAGAVNNQSRPQSHSSGEFSLLHDHEAWSSSGSSPIQYLKRQTRSSPVLQHKISETLESRHHKIKTGSPGSEVVTLQQFLEESNKLTSVQIKSSSQENLLDEVMKSLSVSSDFLGKDKPVSCGLARSVSGKTPGDFYDRRTTKPEFLRPGPRKTEDTYFISSAGKPTPGTQGKIKLVKESSLSRQSKDSNPYATLPRASSVISTAEGTTRRTSIHDFLTKDSRLPISVDSPPAAADSNTTAASNVDKVQESRNSKSRSREQQSS

SEQ ID NO: 2373 - protein, 304 aa, Homo sapiens
MDISGLIPGLVSTFILLSISDHYGRKFPMILSSVGALATSVWLCLLCYFAFPFQLLIASTFIGAFCGNYTTFWGACFAYIVDQCKEHKQKTIRIAIIDFLLGLVTGLTGLSSGYFIRELGFEWSFLIIAVSLAVNLIYILFFLGDPVKECSSQNVTMSCSEGFKNLFYRTYMLFKNASGKRRFLLCLLLFTVITYFFVVIGIAPIFILYELDSPLCWNEVFIGYGSALGSASFLTSFLGIWLFSYCMEDIHMAFIGIFTTMTGMAMTAFASTTLMMFFSQGAVPFHYCAILCSTVHVVKSGSFD

SEQ ID NO: 2374 - protein, 114 aa, Homo sapiens
MGILYDAEVYGTIIPTSQVVSMVPSSFSTLSPSPVSIAAIFMSMSIQCLLLFTSENMQYLVFFCYINSLRIMASSSIHVAAKDMILFFFIAVWYSMMYVYHSFIIRSTVDRHLG

SEQ ID NO: 2375 - protein, 139 aa, Homo sapiens
MFWPQSDACPTPGTPSSMLQEGGQVDPGVCRSLHHNPFPSLSVILQDFTGSTVAHGSVSLLLQSLPFDWSVVSVCRGFNAPPHCAALVSLSLELLARLTRSASSPGHASPSGPVALTVEFAMCSDSGASGLVFCAFYGF

SEQ ID NO: 2376 - protein, 168 aa, Homo sapiens
MPDVPDAFPELSELSVSQLTDMNEQEEVLLEQFLTLPQLKQIITDKDDLVKSIEELARKNLLLEPSLEAKRQTVLDKMKSTFEKKMQRQHELSESCSASALQARLKVAAHEAEEESDNIAEDFLEGKMEIDDFLSSFMEKRTICHCRRAKEEKLQQAIAMHSQFHAPL

SEQ ID NO: 2377 - protein, 352 aa, Homo sapiens
MPSGVPGCWPQLPLKGPWRPTPRPRVPVPWRTPRFACRWLGYLGLLLLDVIICLLVLVGLIRSSKGILVGVCLLGVLALVISWGALGLELAVSVGSSDFCVDPDAYVTKMVEEYSVLSGDILQYYLACSPRAANPFQQKLSGSHKALVEMQDVVAELLRTVPWEQPATKDPLLRVQEVLNGTEVNLQHLTALVDCRSLHLDYVQALTGFCYDGVEGLIYLALFSFVTALMFSSIVCSVPHTWQQKRGPDEDGEEEAAPGPRQAHDSLYRVHMPSLYSCGSSYGSETSIPAAAHTVSNAPVTEYMSQNANFQNPRCENTPLIGRESPPPSYTSSMRAKYLATSQPRPDSSGSH

SEQ ID NO: 2378 - protein, 551 aa, Homo sapiens [sequence omitted]

SEQ ID NO: 2379 - protein, 461 aa, Homo sapiens
MGAGPQHATLQAYPEAGTIEGLASLLVALLEKTTWVDRVHILQVLLRLLPNMSSDLQGQLQGLLVHLLNLDQPPSLQVCPLSCPQFSSPPTGPQQPHPHRLPQDQTQKKFVILALQLLLACSLESRDVVLELMSYFLYSPVHCRPELKKLLHGLGLQDPEGFLFKEMMTWVQGPDLDSKAGLRTCCHQKLEDMIQELQETPSQTSVVSGAPTRASVIPSGTSWSASGIFGRLSQVSEVPLMVVSPAEPHSLAPELQAQRMLAPTRSWGTPQLRLRVLSETLKSFCLEPEARLHPAGPAQLPGEPPPLEETDWSHSQLLDLGPIDALNFFCEQLRAQQRSSLQEKAAHPHPPVPYTVAPVPDMVVPPPREHWYHPILRLQEAKPQRSARSAMRLRGPMPSRLCAGRTLDGPIRTLKLPLPRVEPQPFPLDWPMPPRPLPPRLLQPALQRYFLPADADPDTYS

SEQ ID NO: 2380 - protein, 722 aa, Homo sapiens [sequence omitted]

SEQ ID NO: 2381 - protein, 236 aa, Homo sapiens [sequence omitted]

SEQ ID NO: 2382 - protein, 162 aa, Homo sapiens
MIYSTLTRRRWPMPEPTSEHLNLRPCLIYVLFYVQVQPTLWCNANLWLYCITANKSIWRKRHLVKGHSAMECNAAMCNAAYKKTLGKYCTGQTYDPTFSRNRAAYWMPSEFPFSVSTLLFDAMPPHKSIQATVIYFFPSFSPCYNDPNLRFYFVIFVSFLRQ

SEQ ID NO: 2383 - protein, 776 aa, Homo sapiens
MGTVPDPLRSAKTSLIAASGKEDDLGEPQAASPRHRPALLCKNANGFSGAPAEPDLSPRAAAEALMQVCEHETTQPDMSSPGVFNEVQKAPATFNSPGNPQLPGSSQPAASAPSSAAGRDLIHTPLTMPANQHTCQSIPGDQPNAITSSMPEDSLMRSQRTSNREQPEKPSCPVGGVLSSSKDQVSCEFPSPETIQGTVQTPVTAARVVSHSSSPVGGPEGERQGAICDSEMRSCKPLTRESGCSENKQPSVTASGPQGTTSVTPQPTPLTSEPSACPPGPEKVPLPAQRQMSRFKEASTMTNQAESEIKEVPSRAWQDAEVQAVASVESRSVSTSPSILTAFLKESRAPEHFEQEQLRVICRSSGSHTLELSDSTLAPQESSQCPGIMPQVHIQAAAAESTAFQRENKLASLPGGVLKTSSINLVSSNAQHTCKEDGRLAGMTPAREESTAKKLAGTNSSSLKATAIDQISISACSQAETSYGLGKFETRPSEFAEKTTNGHKTDPDCKLSDSCGSISKADHSGSLDPTNKGDAREKKPASPQVVKEKESTGTDTSDAKTLLLNPKSQESGGTESAANPTPSPIRKNQESTLEENRQTKTATSLSLPSDPMGDSSPGSGKKTPSRSVKASPRRPSRVSEFLKEQKLNVTAAAAQVGLTPGDKKKQLGADSKLQLKQSKRVRDVVWDEQGMTWEVYGASLDAESLGIAIQNHLQRQIREHEKLIKTQNSQTRRSISSDTSSNKKLRGRQHSVFQSMLQNFRRPNCCVRPAPSSVLD

SEQ ID NO: 2384 - protein, 168 aa, Homo sapiens
MNFYTHEVCLGGPLLWAPLPYDGSICSLLFQEDLRPTINGSQIQIPLQAANVHPHYRKPPDTSHLLAAQDTGTQILACPEQWLSRPGRGARAQSQAGLPAHFCLPGHHHLPPRMNLKLQGNEEKPRSEGTCNQGCPKWPLSRPISKYNPHRGCLVGQKSLGLVPVRGE

SEQ ID NO: 2385 - protein, 114 aa, Homo sapiens [sequence omitted]

SEQ ID NO: 2386 - protein, 291 aa, Homo sapiens
MHNKRKRPRKKSPRAHREMLESAVLPPEDMSQSGPSGSHPQGPRGSPTGGAQLLKRKRKLGVVPVNGSGLSTPAWPPLQQEGPPTGPAEGANSHTTLPQRRRLQKKKAGPGSLELCGLPSQKTASLKKRKKMRVMSNLVEHNGVLESEAGQPQALGSSGTCSSLKKQKLRAESDFVKFDTPFLPKPLFFRRAKSSTATHPPGPAVQLNKTPSSSKKVTFGLNRNMTAEFKKTDKSILVSPTGPSRVAFDPEQKPLHGVLKTPTSSPASSPLVAKKPLTTTPRRRPRAMDFF

SEQ ID NO: 2387 - protein, 241 aa, Homo sapiens
MNHEWIGNEWLPSLGLPQYRSYFMECLVDARMLDHLTKKDLRGQLKMVDSFHRNSFQCGIMCLRRLNYDRKELERKREESQSEIKDVLVWSNDRVIRWILSIGLKEYANNLIESGVHGALLALDETFDFSALALLLQIPTQNTQARAVLEREFNNLLVMGTDRRFDEDDDKSFRRAPSWRKKFRPKDIRGLAAGSAETLPANFRVTSSMSSPSMQPKKMQMDGNVSGTQRLDSATVRTYSC

SEQ ID NO: 2388 - protein, 144 aa, Homo sapiens [sequence omitted]

SEQ ID NO: 2389 - protein, 113 aa, Homo sapiens [sequence omitted]

SEQ ID NO: 2390 - protein, 124 aa, Homo sapiens
MVVVLAYIPTISVKAFFHHVCANINFCFFCFCFCFFFEMESRSVTQAGVQWCDISSLQPLPPGFKQFFCLSLLSSWDYRQLPPCLANFCIFSRDSVSPCWSGWSQTPDLLIRPPRPPKVLGLQA

SEQ ID NO: 2391 - protein, 163 aa, Homo sapiens [sequence omitted]

SEQ ID NO: 2392 - protein, 175 aa, Homo sapiens
MHAHKQASTHVHITHTSRHSCTDSYTGHVPARTCTHTHAQALMHRCTHTQGMYLHTRVNTRTGTHADARIHSASTCTRVHIHAHAGTHAQMHTQCTYLHTRVHTHTHRHSCPDANIHCTYLHTRAHTHAQALMQTYAQCTYLHTRTHTHTQALMHRCTHTQCTYLHTRVHAHTVP

SEQ ID NO: 2393 - protein, 189 aa, Homo sapiens
MPEQSNDYRVAVFGAGGVGKSSLVLRFVKGTFRESYIPTVEDTYRQVISCDKSICTLQITDTTGSHQFPAMQRLSISITSRQSLEELKPIYEQICEIKGDVESIPIMLVGNKCDESPSREVQSSEAEALARTWKCAFMETSAKLNHNVKELFQELLNLEKRRTVSLQIDGKKSKQQKRKEKLKGKCVIM

SEQ ID NO: 2394 - protein, 190 aa, Homo sapiens
MAASQQQASAASSAAGVSGPSSAGGPGPQQQPQPPAQLVGPAQSGLLQRYKMLIPQLKESLQTLMKVAAQNLIQNTNIDNGQKSSDGPIQRFDKCLEEFYALCDQLELCLRLAHECLSQSCDSAKHSPTLVPTATKPDAVQPDSLPYPQYLAVIKAQISCAKDIHTALLDCANKVTGKTPAPPAGPGGTL

SEQ ID NO: 2395 - protein, 174 aa, Homo sapiens
MSEFPFTTNRIKYLGIQLTRDVKDLFKEHYKPLLKEIRGHKQMEKNILCSWIGRINIVKMAILPKVIYRFKATPIKLPLTFFAELEKTTLNFLWNHKRAHIVKTILSKKKAGGIRLPDFKLYYKANQNTYRGQWNRTETSEITPDIYLGIQLVSNSRPQVILLPWPPKVLGLQA

SEQ ID NO: 2396 - protein, 141 aa, Homo sapiens
MLACCSPPTMQPGSYQATDQYQSTAQGLGTPGVSSGSFALPMPPGLAAVLETGVSRRLCSWWAGAEMAEAHPIICQKEDTLVSPGLGTLQFAALLRLASGQLLTLPLTPQSQAPDAPWTSPTPRVIWSGSAGVTLSLTKGF

SEQ ID NO: 2397 - protein, 445 aa, Homo sapiens
MPNSSPKDPTTASGNGSKVEREKRKDELLNIAKSKQERTNSELHNLRQIYVKQQSDLQFLNFNVENSQELIQMYDSKMEESKALDSSRDMCLSDLENNHPKVDIKREKNQKSLFKDQKFEAMLVQQNRSDKSSCDECKEKKQQIDTVFGEKSVITLSSIFTKDLVEKHNLPWSLGGKTQIEPENKITLCKIHTKSPKCHGTGVQNEGKQPSETPTLSDEKQWHDVSVYLGLTNCPSSKHPEKLDVECQDQMERSEISCCQKNEACLGESGMCDSKCCHPSNFIIEAPGHMSDVEWMSIFKPSKMQRIVRLKSGCTCSESICGTQHDSPASELIAIQDSHSLGSSKSALREDETESSSNKKNSPTSLLIYKDAPAFNEKASIVLPSQDDFSPTSKLQRLLAESRQMVTDLELSTLLPISHENLTGSATNKSEVPEESAQKNTFVSY

SEQ ID NO: 2398 - protein, 339 aa, Homo sapiens [sequence omitted]

SEQ ID NO: 2399 - protein, 196 aa, Homo sapiens
MSPWKDGGSLVEVYLLDTSIQSDHREIEGRVMVTDFENVPEEDGTRFHRQASKCDSHGTHLAGVVSGRDAGVAKGASMRSLRVLNCQGKGTVSGTLIGLEFIRKSQLVQPVGPLVVLLPLAGGYSRVLNAACQRLARAGVVLVTAAGNFRDDACLYSPASAPEGRTSLVPPATAAPALCHRVGHHRLLPTWLALQP

SEQ ID NO: 2400 - protein, 102 aa, Homo sapiens [sequence omitted]

SEQ ID NO: 2401 - protein, 117 aa, Homo sapiens
MKFFHDLDVILQYEPATQFTEEDANGRYLETLSPSTAPETTEEFLLVCDTRKKGRKRKCLFHCWDQPHASGKMSIASVDKEDVSGNPLLLVSHVRPMELGTLRQYWNPLIIQLLTQL

SEQ ID NO: 2402 - protein, 103 aa, Homo sapiens
MQSKLILSLCTFVSAGHCLFRELVAQGLHMGAKMVVDTPWCTFCFTCFLRLFHKSCEAKKQNKTKQPNKYNLTFTQSTAGNQRSGWNERKYAKRSFLSLISCL

SEQ ID NO: 2403 - protein, 172 aa, Homo sapiens [sequence omitted]

SEQ ID NO: 2404 - protein, 711 aa, Homo sapiens
MLASLKVKKQELANSSDATLPDRPLSPPLTAPPTMKSSEFFEMLEKMQGIKLEEQKPGPQKNKDDYIPYPSIDEVVEKGGPYPQVILPQFGGYWIEDPENVGTPTSLGSSICEEEEEDNLSPNTFGYKLECKGEARAYRRHFLGKDHLNFYCTGSSLGNLILSVKCEEAEGIEYLRVILRSKLKTVHERIPLAGLSKLPSVPQIAKAFCDDAVGLRFNPVLYPKASQMIVSYDEHEVNNTFKFGVIYQKARQTLEEELFGNNEESLAFKEFLDLLGDTITLQDFKGFRGGLDVTHGQTGVESVYTTFRDREIMFHVSTKLPFTDGDAQQLQRKRHIGNDIVAIIFQEENTPFVPDMIASNFLHAYIVVQVETPGTETPSYKVSVTAREDVPTFGPPLPSPPVFQKGPEFREFLLTKLTNAENACCKSDKFAKLEDRTRAALLDNLHDELHAHTQAMLGLGPEEDKFENGGHGGFLESFKRAIRVRSHSMETMVGGQKKSHSGGIPGSLSGGISHNSMEVTKTTFSPPVVAATVKNQSRSPIKRRSGLFPRLHTGSEGQGDSRARCDSTSSTPKTPDGGHSSQEIKSETSSNPSSPEICPNKEKPFMKLKENGRAISRSSSSTSSVSSTAGEGEAMEEGDSGGSQPSTTSPFKQEVFVYSPSPSSESPSLGAAATPIIMSRSPTDAKSRNSPRSNLKFRFDKLSHASSGAGH

SEQ ID NO: 2405 - protein, 165 aa, Homo sapiens
MEHMEFRRKPTKTPACQTHPVPERGVPLSFNELPVITAMPSPRWGGVLGCFSQRPLFPAAISFTWTTLLAHVPLASTGGHRPEPWVQGCPSLLPSPPLKAQSCWVGCLGLPSFPWKPVATLVHGTLDKSAPRGQTCAPILACILRTPHAAGLCAWGGVASLSWSV

SEQ ID NO: 2406 - protein, 120 aa, Homo sapiens [sequence omitted]

SEQ ID NO: 2407 - protein, 106 aa, Homo sapiens [sequence omitted]

SEQ ID NO: 2408 - protein, 109 aa, Homo sapiens
MPFPPRPAPRPPSRTAALGEDEDGRKVRAGLSTGKREQDGDFGRQWGELMGRVQAPFLQPLATWSSDGGAVLSLTPETLIPAVLRGVDNKFHFPSPVLFWEVGTPGFGG

SEQ ID NO: 2409 - protein, 132 aa, Homo sapiens
MISITEWQKIGVGITGFGIFFILFGTLLYFDSVLLAFGNLLFLTGLSLIIGLRKTFWFFFQRHKLKGTSFLLGGVVIVLLRWPLLGMFLETYGFFSLFKGFFPVAFGFLGNVCNIPFLGALFRRLQGTSSMV

SEQ ID NO: 2410 - protein, 180 aa, Homo sapiens [sequence omitted]

SEQ ID NO: 2411 - protein, 409 aa, Homo sapiens
MGSQAAAEWRNWASWEVSSSLSGCSMGCFKDDRIVFWTWMFSTYFMEKWAPRQDDMLFYVRRKLAYSGSESGADGRKAAEPEVEVEVYRRDSKKLPGLGDPDIDWEESVCLNLILQKLDYMVTCAVCTRADGGDIHIHKKKSQQVFASPSKHPMDSKGEESKISYPNIFFMIDSFEEVFSDMTVGEGEMVCVELVASDKTNTFQGVIFQGSIRYEALKKVYDNRVSVAARMAQKMSFGFYKYSNMEFVRMKGPQGKGHAEMAVSRVSTGDTSPCGTEEDSSPASPMHERVTSFSTPPTPERNNRPAFFSPSLKRKVPRNRIAEMKKSHSANDSEEFFREDDGGADLHNATNLRSRSLSGTGRSLVGSWLKLNRADGNFLLYAHLTYVTLPLHRILTDILEVRQKPILMT

SEQ ID NO: 2412 - protein, 189 aa, Homo sapiens
MWELDKASYEIKKVWYGRTIIRSAYKLFYEAAQELLDGNLSVVDDIPEFKDLNEKSRQAKLEELVWAIGKLTDIARHVRAKRDGCGALELEGVEVCVQLDDKKNIHDLIPKQPLEVHETVAECMILANHWVAKKIWESFPHQALLRQHPPPHQEFFSELRECAKAKGFFIDTRYSSFEGAEEWSGMLYI

SEQ ID NO: 2413 - protein, 178 aa, Homo sapiens
MTKRGQGIAWAVASEGASPKPWWLSYGVVPVGVQKTRVELWEPLPQFQRMYGNTWMSRQKSAAWEEPTCRTSTMARHRGNVGLESPHRVPTGALPSGAVKRGPLSSRPLKCRSTDSLHCAPGNAGTQGQPMKAAAGAAPCRATGVELPNSLKDHPFLVSSCLGCETWSQGRSFQSFNI

SEQ ID NO: 2414 - protein, 443 aa, Homo sapiens
MVDTVLYDNTQLQLKAESPWEALDWGQKLWEVVHAAVPGYMGRQNELTISPGLGHHDDYTQNHSFQKKTSGLLPPSPVLDSSKQYQNILKSGTLYRLTVQNNWKAFTFVLSRAYLMAFQPGKLDEDPLLSYNVDVCLAVQMDNLDGCDSCFQVIFPQDVLRLRAETRQRAQEWMEALKIAANVARSSEQNLQVTLRNKPKDQMGGHELRKNKRQSVTTSFLSILTTLSLERGLTAQSFKCAGCQRSIGLSNGKAKVCNYSGWYYCSSCHVDDSFLIPARIVHNWDTSKYKVSKQAKEFLEYVYEEPLIDIQQENAMLYHHAEPLAAVLRLRQRLKSLRAYLFSCRAAVAEDLRRRIFPREYLLQQIHLYSLADLQQVIEGKLAPFLGKVIKFATSHVYSCSLCSQKGFICEICNNGEILYPFEDISTSRFGDPYADLLQGYVA

SEQ ID NO: 2415 - protein, 485 aa, Homo sapiens
MYTSHEDIGYDFEDGPKDKKTLKPHPNIDGGWAWMMVLSSFFVHILIMGSQMALGVLNVEWLEEFHQSRGLTAWVSSLSMGITLIVGPFIGLFINTCGCRQTAIIGGLVNSLGWVLSAYAANVHYLFITFGVAAGLGSGMAYLPAVVMVGRYFQKRRALAQGLSTTGTGFGTFLMTVLLKYLCAEYGWRNAMLIQGAVSLNLCVCGALMRPLSPGKNPNDPGEKDVRGLPAHSTESVKSTGQQGRTEEKDGGLGNEETLCDLQAQECPDQAGHRKNMCALRILKTVSWLTMRVRKGFEDWYSGYFGTASLFTNRMFVAFIFWALFAYSSFVIPFIHLPEIVNLYNLSEQNDVFPLTSIIAIVHIFGKVILGVIADLPCISVWNVFLLANFTLVLSIFILPLMHTYAGLAVICALIGFSSGYFSLMPVVTEDLVGIEHLANAYGIIICANGISALLGPPFAGKLSEVLRAQSACTYGALCYKVPDK

SEQ ID NO: 2416 - protein, 163 aa, Homo sapiens
MKSRIPVVLLACGSFNPITNMHLRMFEVARDHLHQTAVPELKLLCGADVLKTFQTPNLWKDAHIQEIVEKFGLVCVGRVGHDPKGYIAESPILRMHQHNIHLAKEPVQNEISATYIRRALGQGQSVKYLIPDAVITYIKDHGLYTKGSTWKGKSTQSTEGKTS

SEQ ID NO: 2417 - protein, 308 aa, Homo sapiens
MGNYQEYLKTLASPLREIDPDQPKRLHTFGNPFKQDKKGMMIDEADEFVAGPQNKVKRPGEPNSPMSSKRRRSMSLLLRKPQTPPTVTNHVGGKGPPSASWFPSYPNLIKPTLVHTDATIIHDGHEEKMENGQITPDGFLSKSAPSELINMTGDLMPPNQVDSLSDDFTSLSKDGLIQKPGSNAFVGGAKNCSLSVDDQKDPVASTLGAMPNTLQITPAMAQGINADIKHQLMKEVRKFGRKYERIFILLEEVQGPLEMKKQFVEFTIKEAARFKRRVLIQYLEKVLEKINSHHLHNNISHINSRSSC

SEQ ID NO: 2418 - protein, 529 aa, Homo sapiens [sequence omitted]

SEQ ID NO: 2419 - protein, 241 aa, Homo sapiens
MAQEKMELDLEPDTSYGGTLRRSSSAPLIHGLSDLSQVFQPYTLRTRRNSTTIMSRHSLLLSSSPNRIPSSRLHQIKREEGLDMVNRETAHEREMQTAMQISQSWDESLSLSDSDFDKPEKLYSPKRIDFTPVSPAPSPTRGFGKMFVSSSGLPPSPVPSPRRFSRRSQSPVKCIRPSVLGPLKRKGEMETESQPKRLFQGTTNMLSPDAAQLSDLSSWWCYQGEEIPALTRCVEHLQMNE

SEQ ID NO: 2420 - protein, 622 aa, Homo sapiens
MCGLQFSLPCLRLFLVVTCYLLLLLHKEILGCSSVCQLCTGRQINCRNLGLSSIPKNFPESTVFLYLTGNNISYINESELTGLHSLVALYLDNSNILYVYPKAFVQLRHLYFLFLNNNFIKRLDPGIFKGLLNLRNLYLQYNQVSFVPRGVFNDLVSVQYLNLQRNRLTVLGSGTFVGMVALRILDLSNNNILRISESGFQHLENLACLYLGSNNLTKVPSNAFEVLKSLRRLSLSHNPIEAIQPFAFKGLANLEYLLLKNSRIRNVTRDGFSGINNLKHLILSHNDLENLNSDTFSLLKNLIYLKLDRNRIISIDNDTFENMGASLKILNLSFNNLTALHPRVLKPLSSLIHLQANSNPWECNCKLLGLRDWLASSAITLNIYCQNPPSMRGRALRYINITNCVTSSINVSRAWAVVKSPHIHHKTTALMMAWHKVTTNGSPLENTETENITFWERIPTSPAGRFFQENAFGNPLETTAVLPVQIQLTTSVTLNLEKNSALPNDAASMSGKTSLICTQEVEKLNEAFDILLAFFILACVLIIFLIYKVVQFKQKLKASENSRENRLEYYSFYQSARYNVTASICNTSPNSLESPGLEQIRLHKQIVPENEAQAILFEHSAL

SEQ ID NO: 2421 - protein, 407 aa, Homo sapiens [sequence omitted]

SEQ ID NO: 2422 - protein, 209 aa, Homo sapiens
MASRGLSLFPESCPDFCCGTCDDQYCCSDVLKKFVWSEERCAVPEASVPASVEPVEQLGSALRFRPGYNDPMSGFGATLAVGLTIFVLSVVTIIICFTCSCCCLYKTCRRPRPVVTTTTSTTVVHAPYPQPPSVPPSYPGPSYQGYHTMPPQPGMPAAPYPMQYPPPYPAQPMGPPAYHETLAGGAAAPYPASQPPYNPAYMDAPKAAL

SEQ ID NO: 2423 - protein, 590 aa, Homo sapiens [sequence omitted]

SEQ ID NO: 2424 - protein, 144 aa, Homo sapiens [sequence omitted]

SEQ ID NO: 2425 - protein, 100 aa, Homo sapiens [sequence omitted]

SEQ ID NO: 2426 - protein, 141 aa, Homo sapiens
MAERGQHEAQAMASEGESLKPWQLPCDVEHVGAQKSRNGVWEPLSRFQKMYGNAWMPRQKFAAGAGLSWRTSARAVQKGNVGLEPPHRVPTGTPPSGAVRRGPLSSRPQNGRSTYSLYQVPGKAADTQHQPMKAARMEAVP

SEQ ID NO: 2427 - protein, 292 aa, Homo sapiens
MTELLNRVDKKAAPQTESGSSNASCRNVLKGSSQGSCLIGSSISTQGNHKKNMKIKADMEVPKDSLVKEANENLQEDEDDAVADSVFQSHIIESNCQMRTLDSGIGTFPLPDSGNRSTGRYLCQPDSPEDAEPLLPLQSALSAVSSMRAQTLEREVPSSTDGQRPADSAIVHSTSDPIMTARGMRPLQSRLPKPASSGKVSSQKQNEAEPRPQTCSSFGYAEDPMASQPLPDWGSEVAATGTQDKAPRMCTYSASGGSNSDSDLDYGDNGFGAGRGQLVKALKSAAPEIETT

SEQ ID NO: 2428 - protein, 599 aa, Homo sapiens [sequence omitted]

SEQ ID NO: 2429 - protein, 105 aa, Homo sapiens
MQRRTTMRYHLMPVRMVIIKKSKNNRCWRGCGEVGTLLHCWWECKLVQPLWKCVWLFLKDLELEILFVPAIPLLGIYPKEYKPFYYKDTCTFLFIAALFTIAKTQ

SEQ ID NO: 2430 - protein, 166 aa, Homo sapiens
MKSKERHPCSPSDHRRSRSPSQRRTRSRSSSWGRNRRRSDSLKESRHRRFSYSQSKSRSKSLPRRSTSARQSRTPRRNFGSRGRSRSKSLQKRSKSIGKSQSSSPQKQTSSGTKSRSHGRHSDSIARSPCKSPKGYTNSETKVQTAKHSHFRSHSRSRSYRHKNSW

SEQ ID NO: 2431 - protein, 171 aa, Homo sapiens
MREEMSLGCQEAFEIFKRDHADSVTIDDNKQILKQRFSEAKALGESINEARSKIGHLKEEITQRHIQQVALGISENMAVPLMPDQQEEKLRSQLEEEKRRYKTMFTRLKALKVEIEHLQLLMDKAKVKLQKEFEVWWAEEATNLQVNSPAVNSLDHTKSKIKALADSMSVM

SEQ ID NO: 2432 - protein, 112 aa, Homo sapiens [sequence omitted]

SEQ ID NO: 2433 - protein, 341 aa, Homo sapiens
MNCNFQKHAPLEEFYSFGESMCEYFGHRGSKQLHRGKPVRLGYKIWCGTTSRGYLVWFEPSQGTLFTKPDRSLDLGGSMVIKFVDALQERGFLPYHIFFDKVFTSVKLMSILRKKGVKATGTVREYRTERCPLKDPKELKKMKRGSFDYKVDESEEIIVCRWHDSSVVNICSNAVGIEPVRLTSRHSGAAKTRTQVHQPSLVKLYQEKVGGVGRMDQNIAKYKVKIRGMKWYSSFIGYVIDAALNNAWQLHRICCQDAQVDLLAFRRYIACVYLESNADTTSQGRRSRRLETESRFDMIGHWIIHQDKRTRCALCHSQTNTRCEKCQKGVHAKCFREYHIR

SEQ ID NO: 2434 - protein, 102 aa, Homo sapiens [sequence omitted]

SEQ ID NO: 2435 - protein, 159 aa, Homo sapiens [sequence omitted]

SEQ ID NO: 2436 - protein, 131 aa, Homo sapiens
MSPVSRVEIDVLQNSLLDDLAPGSGKSEPRPRFTVLPQILGMLQEAELQGPSGFRPQTPGSLQSHHESCSVAQAGVQWCDLGSLQRLPPRFKRFSHLSLLNRWDYRHPPPRPDNICIFSRDGVSTYSPGWP

SEQ ID NO: 2437 - protein, 673 aa, Homo sapiens
MTAPPISHEYYDPAEFMEGGPQEADRLDELEYEEVELYKSSHRDKLGLMVCYRTDDEEDLGIYVGEVNPNSIAAKDGRIREGDRIIQINGVDVQNREEAVAILSQEENTNISLLVARPESQLAKRWKDSDRDDFLDDFGSENEGELRARKLKSPPAQQPGNEEEKGAPDAGPGLSNSQELDSGVGRTDESTRNEESSEHDLLGDEPPSSTNTPGSLRKFGLQGDALQSRDFHFSMDSLLAEGAGLGGGDVPGLTDEEYERYRELLEIKCHLENGNQLGLLFPRASGGNSALDVNRNESLGHEMAMLEEELRHLEFKCRNILRAQKMQQLRERCMKAWLLEEESLYDLAASEPKKHELSDISELPEKSDKDSTSAYNTGESCRSTPLLVEPLPESPLRRAMAGNSNLNRTPPGPAVATPAKAAPPPGSPAKFRSLSRDPEAGRRQHAEERGRRNPKTGLTLERVGPESSPYLSRRHRGQGQEGEHYHSCVQLAPTRGLEELGHGPLSLAGGPRVGGVAAAATEAPRMEWKVKVRSDGTRYVAKRPVRDRLLKARALKIREERSGMTTDDDAVSEMKMGRYWSKEERKQHLIRAREQRKRREFMMQSRLECLREQQNGDSKPELNIIALSHRKTMKKRNKKILDNWITIQEMLAHGARSADGKRVYNPLLSVTTV

SEQ ID NO: 2438 - protein, 142 aa, Homo sapiens
MAFSSTHPHTACRKGPREKSQGRKAEEDGPGFGLSVLGALLPQEGQRGPWCCCHHYHPGHEIAGLGQTQRRTGRARVSQEHSSSALGCWQVALMAFQRQSLHPGQSSLFSGAKHIGSFVQFINSTSLFLRETWLWPVLLPHP

SEQ ID NO: 2439 - protein, 120 aa, Homo sapiens [sequence omitted]

SEQ ID NO: 2440 - protein, 275 aa, Homo sapiens
MSTIGSFEGFQAVSLKQEGDDQPSETDHLSMEEEDPMPRQISRQSSVTESTLYPNPYHQPYISRKYFATRPGAIETAMEDLKGHVAETSGETIQGFWLLTKIDHWNNEKERILLVTDKTLLICKYDFIMLSCVQLQRIPLSAVYRICLGKFTFPGMSLDKRQGEGLRIYWGSPEEQSLLSRWNPWSTEVPYATFTEHPMKYTSEKFLEICKLSGFMSKLVPAIQNAHKNSTGSGRGKKLMVLTEPILIETYTGLMSFIGNRNKLGYSLARGSIGF

SEQ ID NO: 2441 - protein, 248 aa, Homo sapiens
MSQDPLFLDLMGTCHSDSTKPAILKPQHLTWYRTHLARGLTLYPPDILDAMLKEKKLAQDQNGALMIPIQDLEDMPAPQYPYIPPMTEFFFDGTSDITIFPPPISVEPVEVDFGACPGPEAPNPVPLCLMNHTKGKIMVVWTRRSDCPFWVTPESCDVPPLKSMAMRLHFQPPHPNCLYTVELEAFAIYKVCARNEREECGVSARSLSGLVGWQEVTEGSFRLHPLRARLSLGWTVTPMSLSPPKLLA

SEQ ID NO: 2442 - protein, 112 aa, Homo sapiens
MAKWGCEPLAQRLHPRLEVILHVPKQAMPRSAKKSGQPGHECTPRSPGNFIQDTTQPVLQPAGHRLPQLSRATTTLTEVSQEATLDTGRQQGMERGKKGGKTPSCGRVAKDG

SEQ ID NO: 2443 - protein, 110 aa, Homo sapiens
MGVEEFGVNLYILQIIFGGVDVPAKFITILSLSYLGRHTTQAAALLLAGGAILALTFVPLGERLGLPQNPLEEAARLGARDFTAGSASKSLCYLEQVPALSGAQGLSSRK

SEQ ID NO: 2444 - protein, 237 aa, Homo sapiens [sequence omitted]

SEQ ID NO: 2445 - protein, 104 aa, Homo sapiens
MRTATSTGRRISPNSQVSGLMATTAESTPRPGASSCLAGVTAPSTPTGCGSAARKSITLYTLNGKKVEVAVKQIIAGKAVEQGGAFSNPETLDLYRDIPELQGF

SEQ ID NO: 2446 - protein, 108 aa, Homo sapiens [sequence omitted]

SEQ ID NO: 2447 - protein, 117 aa, Homo sapiens
MCNKAGETVQHTRGQPFPLMVAELTPGGGLTPAARARLDFRNMALLAWDSRAVEIPVGGRPGPSHGLGSRKPRFHTMERQPPAWAGRGLSHLLLSSAGLRRAELPGAGVANEDNKQM

SEQ ID NO: 2448 - protein, 132 aa, Homo sapiens [sequence omitted]

SEQ ID NO: 2449 - protein, 142 aa, Homo sapiens [sequence omitted]

SEQ ID NO: 2450 - protein, 100 aa, Homo sapiens [sequence omitted]

SEQ ID NO: 2451 - protein, 110 aa, Homo sapiens
MFVHLCGDICDILLTCIECVMIKSEYLGYPSLRVSTICMCWEHFKFSPLAILKYTTYCELESPYSAIQYYNLFLLSDCMLYPLTNLSSSPCPLTYPFQTLESIILLYFYF

SEQ ID NO: 2452 - protein, 159 aa, Homo sapiens
MQTAAHHRGVPHGCLSLLGWSKTSHSLEAPEDDGGWSSAEEQINSSDAEEDGGLGPKKLVPGKYTVVADHEKGGPDALRVRSGDVVELVQEGDEGLWYVRDPTTGKEGWVPASSLSVRLGPSGSAQCLSSSESSPGSAVLSNSSSCSEGGQAPFSDLQG

SEQ ID NO: 2453 - protein, 104 aa, Homo sapiens [sequence omitted]

SEQ ID NO: 2454 - protein, 115 aa, Homo sapiens
MGWGKVARFRRRERKNRCSSKEDCRCSPGPGSLPRRRAARTPASWQRSPRRNHHSEAFCPLAAALPKTTGPPGGRDKPTRSLVFRERRVPVSLREMMFKIPARAPSPAVKHQLAA

SEQ ID NO: 2455 - protein, 128 aa, Homo sapiens
MPALGPLLRLELMRAAVDTGGTQRPAACESSRGQSWEPGAGTRQVSDCEMPAASPRKAACSIWKLLCSPWPLCSSSPGLGSTRVPLCLSRAHSPTAPACTVMTSGRWVPAPSRPRPPSLLPASCPADP

SEQ ID NO: 2456 - protein, 160 aa, Homo sapiens [sequence omitted]

SEQ ID NO: 2457 - protein, 204 aa, Homo sapiens
MDSDSGEQSEGEPVTAAGPDVFSSKSLALQAQKKILSKIASKTVANMLIDDTSSEIFDELYKVTKEHTHNKKEAHKIMKDLIKVAIKIGILYRNNQFSQEELVIVEKFRKKLNQTAMTIVSFYEVEYTFDRNVLSNLLHECKDLVHELVQRHLTPRTHGRINHVFNHFADVEFLSTLYSLDGDCRPNLKRICEGINKLLDEKVL

SEQ ID NO: 2458 - protein, 215 aa, Homo sapiens
MEPTYRVASRETHGHAPSLRPSGPLVKLHQGCFLLGCVSGRQLRLVGDNLCWEVTLLPRKFWNPQPGAGTGASSLAESQVTRGPHVSGFTFPYFIHSLTQSLRITEEHWAEHMTGSLEPRGLQRGLRRVVRVTTVGSLPSQKVDRAYPGGGDHPAIRCLRQGLGQLRQAVFFFPFLFNRCNIFIIILETFFLPKITDQKKFHLKYHAQESTWDQK

SEQ ID NO: 2459 - protein, 718 aa, Homo sapiens
MDLGKVRRAKAILSHLVKCIAGEVAIVRDPDAGEGTKRHLSRTISVSGSTAKETVTVGKDGTRDYTEIDSIPPLPLYALLAADQDTSYRISEESTKIPQSYEDQTVSQPEDQYSELFQIQDIPTDDIDLEPEKRENKSKVINLSQYGPAYFGQEHARVLSSHLMHSSLPGLTRLEQMFLVALADTVATTSTELDESRDKSCSGRDTLDECGLRYLLAMRLHTCLLTSLPPLYRVQLLHQGVSTCHFAWAFHSEAEEELINMIPAIQRGDPQWSELRAMGIGWWVRNINTLRRCIEKVAKASFQRNNDALDAALFYLSMKKKAVVWGLFRSQHDEKMTTFFSHNFNEDRWRKAALKNAFSLLGKQRFEQSAAFFLLAGSLKDAIEVCLEKMEDIQLAMVIARLYESEFETSSTYISILNQKILGCQKDGSGFSCKRLHPDPFLRSLAYWVMKDYTRALATLLEQTPKEDDEHQVIIKSCNPVAFSFYNYLRTHPLLIRRNLASPEGTLATLGLKTEKNFVDKINLIERKLFFTTANAHFKVGCPVLALEVLSKIPKVTKTSALSAKKDQPDFISHRMDDVPSHSKALSDGNGSSGIEWSNVTSSQYDWSQPIVKVDEEPLNLDWGEDHDSALDEEEDDAVGLVMKSTDAREKDKQSDQKASDPNMLLTPQEEDDPEGDTEVDVIAEQLKFRACLKILMTELRTLATGYEVDGGKLIHLL

SEQ ID NO: 2460 - protein, 161 aa, Homo sapiens
METKKDHPYTWRIELAKTEKYWDGWFRGLSNLFLSCPIPKLLLLAGVDRLDKDLTIGQMQGKFQMQVLPQCGHAVHEDAPDKVSLVLSDCKRTTVRITLDVTEDKSLSLSLHCLQQLLWSLCRCSSTSSPTSPWQLLMVLVLCICAEELLTLCYFIPGPCG

SEQ ID NO: 2461 - protein, 109 aa, Homo sapiens
MTKPWIRSHETRIQESLSQFGHKQVMINPGPTTSLGNTTISQSAKTEPERETLQVQEERFQLLLLSVASPNVTTFSEQGLVTTTKHCSGTAEPLAWHVVTHSQHNSLTF

SEQ ID NO: 2462 - protein, 329 aa, Homo sapiens
MHQGLKDVGAKVTGFSEGVVDSVKGGFSSFSQATHSAAGAVVSKPREIASLIRNKFGSADNIPNLKDSLEEGQVDDAGKALGVISNFQSSPKYGSEEDCSSATSGSVGANSTTGGIAVGASSSKTNTLDMQSSGFDALLHEIQEIRETQARLEESFETLKEHYQRDYSLIMQTLQEERYRCERLEEQLNDLTELHQNEILNLKQELASMEEKIAYQSYERARDIQEALEACQTRISKMELQQQQQQVVQLEGLENATARNLLGKLINILLAVMAVLLVFVSTVANCVVPLMKTRNRTFSTLFLVVFIAFLWKHWDALFSYVERFFSSPR

SEQ ID NO: 2463 - protein, 105 aa, Homo sapiens
MVSTTSFIACFLIWPPARLVMEGVHSPGSVIVPILYEACLWSGPLTVFILLDPYSPIRQVLPLRIKNKVSEEEVGKYTIVGICAKRSHEKRFLHQPRKVEMSALR

SEQ ID NO: 2464 - protein, 210 aa, Homo sapiens
MLLLPPSCEAVAPRGWRRSCSCPECCRVCSSPVRLQRHRALLSTPESFACAASARASSAPGPGAAREPASGFQWAPWAVPAFPTSASGKAWPSLRFGVATCLLGISHLPTCACSRLALCGPRFPHVPRGKNIPSPTIWQRLAFSGPRPPHLLGGESRPGHIGANGWSLDLGLHICSAGRNIPSPALYLGGWPRPSRQRRPSGKRTNPCGP

SEQ ID NO: 2465 - protein, 104 aa, Homo sapiens
MLPSPPTDVISFYIRDSSEPTPLRIYTLVFVLLLSLGWPVTLISAMQKWFSASSKTTKRKKSSTFQYPSRHQAPAVSPASRPRVTTTNPAEPTSASQPWLQNHE

SEQ ID NO: 2466 - protein, 100 aa, Homo sapiens
MVVSWLLETRHNQEGEGINLGWAGAETHGMTPILSPQARPPRHPQDHTGESHPHGLDWSWGPPVVLLTGVQCSRAAQRGARKGPSPSPAIPISASLALVP

SEQ ID NO: 2467 - protein, 133 aa, Homo sapiens [sequence omitted]

SEQ ID NO: 2468 - protein, 269 aa, Homo sapiens
MPFMDESSGSDDDCSSQASFRISVPSSESRKTSGLGSPRAIKRGVSMSSLSSEGDYAIPPDACSLDSDYSEPEHKLQRTSSYSTDGLGLGGESLEKSGYLLKMGSQVKTWKRRWFVLRQGQIMYYKSPSDVIRKPQGQVDLNSRCQIVRGEGSQTFQLISEKKTYYLTADSPSLLEEWIRVLQSLLKVQATGPPALLRGGTKPTVKGWLTKVKHGHSKVVWCALVGKIFYYYRSHEDKVLLSLLTIPTLLLPPKHMTATLCPDESPYPT

SEQ ID NO: 2469 - protein, 132 aa, Homo sapiens [sequence omitted]

SEQ ID NO: 2470 - protein, 148 aa, Homo sapiens [sequence omitted]

SEQ ID NO: 2471 - protein, 117 aa, Homo sapiens
MAKTEIELQYRAFPLLGLKSRCLWKGHTFDSLDSGEVTKVPRKWEHKWELLEVSGVPGGPSTESGVLNHQSELPECQRELVVAGHCWNRNLEKQPSRSPACLQDGPGILGLKRCGEQ

SEQ ID NO: 2472 - protein, 107 aa, Homo sapiens
MPLGCREEAGGVMGMGSGRGREGPSTKAWEMRGGGGRAGEAKSQPWREHPGASVSGYTQHFATCGPAGAEDGGEEASSPCVYCRQKGLVFWFWGFCFVCVLFGLFVF

SEQ ID NO: 2473 - protein, 102 aa, Homo sapiens
MRRVGDENFWPPCSGLLFKHLKISRSFTLGQMTSAGILLCPCCAKRESISSFDFHYKKPLSLTFVLCRCHYYYWEQCCVINTGALETATLDWIPTLPLTCVA

SEQ ID NO: 2474 - protein, 109 aa, Homo sapiens
MLCGEPSRGFSPSHLHQHIPDLASHSCALSASFLFLVPLPLEQVNYRNTRRDSRNPLSLRFYLQMIGALFLGTSSSSHSQLVTLELPVGRAQGCRALGGHLPHSLPTHQ

SEQ ID NO: 2475 - protein, 515 aa, Homo sapiens [sequence omitted]

SEQ ID NO: 2476 - protein, 153 aa, Homo sapiens [sequence omitted]

SEQ ID NO: 2477 - protein, 160 aa, Homo sapiens [sequence omitted]

SEQ ID NO: 2478 - protein, 215 aa, Homo sapiens
MCWGKHWPRPEGRNLACSKGSPGWRTAGQGSGSYGAATLGKGTEQRGVGALRRGLLSFTCFCLSNWTSGAGFSEMGRSRFEEGRLGYSSDVLSARPTMSPTEMLRSRALNLGAATVLRRHRAPQGTSSYQEGRRAHEATSAESDDDNGVQVLASLAVSCAQHSRHKDPVGTQLQQACAQVPTSRAPLWPCPSHRLMHSTDGPLDPEPLSTLLPAA

SEQ ID NO: 2479 - protein, 485 aa, Homo sapiens [sequence omitted]

SEQ ID NO: 2480 - protein, 393 aa, Homo sapiens [sequence omitted]

SEQ ID NO: 2481 - protein, 100 aa, Homo sapiens
MSYLGSLFVFECLVFIEPYSLRRWNIWKNFKTIKILKQSWQTKTSTSVHDCIITIIVPLHIMFFFLRQKRCLKTKNCAEKVCPTYLWYMIGYIKGRYWLN

SEQ ID NO: 2482 - protein, 108 aa, Homo sapiens
MILSLFYVLLCHLDILFGDTSSKIFCSFWAVVTLVLSFDSPFYILDTSFIRYPFCKACNLSFYFFNSIFQKQKFSMLMKLSLSSFSFMYCVFGIVSKTSLPEMRSCMV

SEQ ID NO: 2483 - protein, 205 aa, Homo sapiens [sequence omitted]

SEQ ID NO: 2484 - protein, 259 aa, Homo sapiens
MKDLGNPVLDEEGVAQREESAQGTPILGDGATGASPRLKGERGSRPACRSGRRIGLPSGWGGSKPTIAALGGGGALQGPAAPSGPLPPHRRFYDSGAIMLRDEATILTGMLIGLSAIDFSFCLKGEVLDGKTPVVIDYTPYLKFTQSYDYLTDEEERHSAESSTSEDNSPEHPYLPLVTDEDSWYSKWHKMEQKFRIVYAQKGYLEELVRLRESQLKDLEAENRRLQLQLEEAAAQNQREKRELEGVILELQEQLSDPQ

SEQ ID NO: 2485 - protein, 161 aa, Homo sapiens [sequence omitted]

SEQ ID NO: 2486 - protein, 423 aa, Homo sapiens
MKRNGSRNCLNRRSRFGSRERDWLREDVKRGCVYLYGADTTTATTTTTTSSSSSSSSSSSDLHLVLCTVETPASEICAGEGRESLYLQLHGDLVRRLEPTERPLQIVYDYLSRLGFDDPVRIQEEATNPDLGCMIRFYGEKPCHMDRLDRILLSGIYNVRKGKTQLHKWAERLVVLCGTCLIVSSVKDCQTGKMHILPLVGGKIEEVKRRQYSLAFSSAGAQAQTYHVSFETLAEYQRWQRQASKVVSQRISTVDLSCYSLEEVPEHLFYSQDITYLNLRHNFMQLERPGGLDTLYKFSQLKGLNLSHNKLGLFPILLCEISTLTELNLSCNGFHDLPSQIGNLLNLQTLCLDGNFLTTLPEELGNLQQLSSLGISFNNFSQIPEVYEKLTMLDRVVMAGNCLEVLNLGVLNRMNHIKHVDLR

SEQ ID NO: 2487 - protein, 104 aa, Homo sapiens
MKSYPSCHWWIMFLVSCLGTLTPGHEEFFFFLFLTHILTLSPRLGCSGTISTHCNLCLLGSSDSCASVSQVAGTTGVHHHSQPIFFLFFIFSRVGISPYRLGWS

SEQ ID NO: 2488 - protein, 879 aa, Homo sapiens [sequence omitted]

SEQ ID NO: 2489 - protein, 636 aa, Homo sapiens [sequence omitted]

SEQ ID NO: 2490 - protein, 111 aa, Homo sapiens
MHADEYASWVFTRSSWEASSVSQAHRLCAREGEHLSLGTAFVPAYRPPQEPASWLPSHRPPAGLTYASFCRRQAHFSPVTNMELRVKEGSCTHLLIHLFTHLLTHQSFLQQ

SEQ ID NO: 2491 - protein, 370 aa, Homo sapiens
MLAPGSSPGQRGRLALQWRQVSWITCWIALYAVEALPTCPFSCKCDSRSLEVDCSGLGLTTVPPDVPAATRTLLLLNNKLSALPSWAFANLSSLQRLDLSNNFLDRLPRSIFGDLTNLTELQLRNNSIRTLDRDLLRHSPLLRHLDLSINGLAQLPPGLFDGLLALRSLSLRSNRLQNLDRLTFEPLANLQLLQVGDNPWECDCNLREFKHWMEWFSYRGGRLDQLACTLPKELRGKDMRMVPMEMFNYCSQLEDENSSAGLDIPGPPCTKASPEPAKPKPGAEPEPEPSTACPQKQRHRPASVRRAMGTVIIAGVVCGVVCIMMVVAAAYGCIYASLMAKYHRELKKRQPLMGDPEGEHEDQKQISSVA

SEQ ID NO: 2492 - protein, 158 aa, Homo sapiens
MEKGLRRTQQCGSATAGNHETETARWRQPDTKLGTQTPRFPPWPHPWAKSNSEPSSSSISFNPHRGCLLFTAVEVRVGVGGMLFSCRLSSWDEETSSLLGLAGPAKQMHTLTTAQGLRQVCSLSKTCPGFSKGKSIRKRMENLYSFILLPSNGHSPMY

SEQ ID NO: 2493 - protein, 156 aa, Homo sapiens [sequence omitted]

SEQ ID NO: 2494 - protein, 919 aa, Homo sapiens
MAPSRFRTQLELVSNVLIFSCTNIVGVCTHYPAEVSQRQAFQETRECIQARLHSQRENQQQERLLLSVLPRHVAMEMKADINAKQEDMMFHKIYIQKHDNVSILFADIEGFTSLASQCTAQELVMTLNELFARFDKLAAENHCLRIKILGDCYYCVSGLPEARADHAHCCVEMGMDMIEAISLVREVTGVNVNMRVGIHSGRVHCGVLGLRKWQFDVWSNDVTLANHMEAGGKAGRIHITKATLNYLNGDYEVEPGCGGERNAYLKEHSIETFLILRCTQKRKEEKAMIAKMNRQRTNSIGHNPPHWGAERPFYNHLGGNQVSKEMKRMGFEDPKDKNAQESANPEDEVDEFLGRAIDARSIDRLRSEHVRKFLLTFREPDLEKKYSKQVDDRFGAYVACASLVFLFICFVQITIVPHSIFMLSFYLTCSLLLTLVVFVSVIYSCVKLFPSPLQTLSRKIVRSKMNSTLVGVFTITLVFLAAFVNMFTCNSRDLLGCLAQEHNISASQVNACHVAESAVNYSLGDEQGFCGSPWPNCNFPEYFTYSVLLSLLACSVFLQISCIGKLVLMLAIELIYVLIVEVPGVTLFDNADLLVTANAIDFFNNGTSQWSLCENLRHRRMEAGTYFPSGVKEQSPEHATKVALKVVTPIIISVFVLALYLHAQQVESTARLDFLWKLQATEEKEEMEELQAYNRRLLHNILPKDVAAHFLARERRNDELYYQSCECVAVMFASIANFSEFYVELEANNEGVECLRLLNEIIADFDEIISEDRFRQLEKIKTIGSTYMAASGLNDSTYDKVGKTHIKALADFAMKLMDQMKYINEHSFNNFQMKIGLNIGPVVAGVIGARKPQYDIWGNTVNVASRMDSTGVPDRIQVTTDMYQVLAANTYQLECRGVVKVKGKGEMMTYFLNGGPPLS

SEQ ID NO: 2495 - protein, 239 aa, Homo sapiens
MGYVREYILWAASKSQLLAHQFIWNMKTNIYLDEEGHQKDPDIGDLLDQLVEEITGSLSGPAKDFYQREFDFFNKITNVSAIIKPYPKGDERKKACLSALSEVKVQPGCYLPSNPEAIVLDIDYKSGTPMQSAAKAPYLAKFKVKRCGVSELEKEGLRCRSDSEDECSTQEADGQKISWQAAIFKVGDDCRQVSRVRPRVGLGTGLAAPQGSRPARVQSHMQKCESFPSLIWFRCHGVN

SEQ ID NO: 2496 - protein, 206 aa, Homo sapiens
MPPALSSRSCTELGATSCTETSRVARSCTTQSALAARMWSATCWTTPPQRSLMRWRKSKYLGSAEPWSPRKPPFSPPLPFCQVRAHKLPGHICHPLGHPYCPRALNFLPFLMALGRQMGGSGDGMGYTASPCSPSGETCLHQAAALGQRTICHYIVEAGASLMKTDQQGDTPRQRAEKAQDTELAAYLENRQHYQMIQREDQETAV

SEQ ID NO: 2497 - protein, 126 aa, Homo sapiens [sequence omitted]

SEQ ID NO: 2498 - protein, 393 aa, Homo sapiens [sequence omitted]

SEQ ID NO: 2499 - protein, 333 aa, Homo sapiens
MMSPSKLLISRGSALTQVWLTAAILGQVGAEQSAWKGDLYGRQLWEGWCWCWSSQAPYSLLMPFSRLPGDLVKHHIDIILNQRNYMAATLKIIERNFPELLSLNLCDNKLYHLDGLPDIIEKAPKVKTLNLSKNKLKSAWELGKVKGLKLEELWLEGNSLCSTFSDQSAYVSIIREYFPKLLCLDGQELASPIIIGIEAPEIIKPCKESYKGSETIKSLVLQFLLQYYLIYDSEDRTGLLSVYHDKACFSLTITLNPEDPEPSSLEKYFKDSRNIKNIKDPCLRIQLLKHTKREIVDSLSVLPRTQHDLNSYVVDLCIQTVSTCFLPQSGPES

SEQ ID NO: 2500 - protein, 294 aa, Homo sapiens [sequence omitted]

SEQ ID NO: 2501 - protein, 130 aa, Homo sapiens [sequence omitted]

SEQ ID NO: 2502 - protein, 100 aa, Homo sapiens [sequence omitted]

SEQ ID NO: 2503 - protein, 159 aa, Homo sapiens
MNGGTSLHQKCQLKPRGSFFSVALRERPRESHGVFPFQFRSTPRAVTVSPPFLPGEKKVLGVPSAGQRKNSPFFAPVPKGSFCFHFHLSHGRRPAGVQFADPTSPMMPNSILTVSHVALSVLGTGESLWAMILGWTGVPWAPLPPSFPQSMTRQPFPVT

SEQ ID NO: 2504 - protein, 119 aa, Homo sapiens [sequence omitted]

SEQ ID NO: 2505 - protein, 583 aa, Homo sapiens [sequence omitted]

SEQ ID NO: 2506 - protein, 247 aa, Homo sapiens
MKRLLTTGVSRWNTRQIALWDQEDLSMPLIEEEIDGLSGLLFPFYDADTHMLYLAGKGDGNIRYYEISTEKPYLSYLMEFRSPAPQKGLGVMPKHGLDVSACEVFRFYKLVTLKGLIEPISMIVPRRSDSYQEDIYPMTPGTEPALTPDEWLGGINRDPVLMSLKEGYKKSSKMVFKAPIKEKKSVVVNGIDLLENVPPRTENELLRMFFRQQDEIRRLKEELAQKDIRIRQLQLELKNLRNSPKNC

SEQ ID NO: 2507 - protein, 345 aa, Homo sapiens
MAPVSWITPGLKTTAVCRGVLRGVTFLLRREGDHEFLEVPEAQEDVEATFPVHQPGNYSCSYRTDGEGALSEPSATVTIEELAAPPPPVLMHHGESSQVLHPGNKVTLTCVAPLSGVDFQLRRGEKELLVPRSSTSPDRIFFHLNAVALGDGGHYTCRYRLHDNQNGWSGDSAPVELILSDETLPAPEFSPEPESGRALRLRCLAPLEGARFALVREDRGGRRVHRFQSPAGTEALFELHNISVADSANYSCVYVDLKPPFGGSAPSERLELHVDGELAGHQRGRARVQCPSGPPVFPLFPWASDGGALGLGSAPIAYPGGEQAIGGRGSGDAWNFGLFPTDASP

SEQ ID NO: 2508 - protein, 105 aa, Homo sapiens [sequence omitted]

SEQ ID NO: 2509 - protein, 114 aa, Homo sapiens
MRWRQRSFLLRLFLGSLRGGQHHPPLTLPSASSLPFSTLSLLLASSLSCCLVSPCPKTPGSFVLLPWPPPRRRSQAPSPRRGIHTTGSCWGWGSPAGFLMPCAQGVAAVIFGLS

SEQ ID NO: 2510 - protein, 243 aa, Homo sapiens
MQFRLFSFALIILNCMDYSHCQGNRWRRSKRASYVSNPICKGCLSCSKDNGCSRCQQKLFFFLRREGMRQYGECLHSCPSGYYGHRAPDMNRCARCRIENCDSCFSKDFCTKCKVGFYLHRGRCFDECPDGFAPLEETMECVEGCEVGHWSEWGTCSRNNRTCGFKWGLETRTRQIVKKPVKDTIPCPTIAESRRCKMTMRHCPGGKRTPKAKEKRNKKKKRKLIERAQEQHSVFLATDRANQ

SEQ ID NO: 2511 - protein, 144 aa, Homo sapiens
MCGWAAYLMREPPPKPEPSSLCGQHPGRPGGAASPAPTPSAWCWPVAPEPLTSPVRGLGPSPGPWWQLPVAQAACPAPRVEVELRGLLLQGAEGQRPGFGYGGRASDYKSAHKGFKGVDAQGTLSKIFKLGGRDSRSGSPMARR

SEQ ID NO: 2512 - protein, 172 aa, Homo sapiens [sequence omitted]

SEQ ID NO: 2513 - protein, 678 aa, Homo sapiens
MVRAGGRAWQQGLHSLSAVSILAKGFMFLLVGDSRAESVTNTLVLFTIGEESLTIFVDKQKLGRKTETTGGASIIGGSGNSTAVSLETLHQLAASYFIDRESTLRRLHHIQIATGAIKVTETRTGPLGCSNYDNLDSVSSVLVQSPENKVQLLGLQVLLPEYLRERFVAAALSYITCSSEGELVCKENDCWCKCSPTFPECNCPDADIQAMEDSLLQIQDSWATHNRQFEESEEFQALLKRLPDDRFLNSTAISQFWAMDTSLQHRYQQLGAGLKVLFKKTHRILRRLFNLCKRCHRQPRFRLPKERSLSYWWNRIQSLLYCGESTFPGTFLEQSHSCTCPYDQSSCQGPIPCALGEGPACAHCAPDNSTRCGSCNPGYVLAQGLCRPEVAESLENFLGLETDLQDLELKYLLQKQDSRIEVHSIFISNDMRLGSWFDPSWRKRMLLTLKSNKYKPGLVHVMLALSLQICLTKNSTLEPVMAIYVNPFGGSHSESWFMPVNEGSFPDWERTNVDAAAQCQNWTITLGNRWKTFFETVHVYLRSRIKSLDDSSNETIYYEPLEMTDPSKNLGYMKINTLQVFGYSLPFDPDAIRDLILQLDYPYTQGSQDSALLQLIELRDRVNQLSPPGKVRLDLFSCLLRHRLKLANNEVGRIQSSLRAFNSKLPNPVEYETGKLCS

SEQ ID NO: 2514 - protein, 121 aa, Homo sapiens
MLRNPGSQGPAAAGRGAVQEAGLGMSTGLRLAESRVEPALEKQAQLEEQLRDKVLHEKDLSQQQMQSDLDKADLSARRVPGGCCMRQASLQKSDRAGPGSEASTEAESGEGSGRQGPHREA

SEQ ID NO: 2515 - protein, 766 aa, Homo sapiens
MIWRSRAGAELFSLMALWEWIALSLHCWVLAVAAVSDQHATSPFDWLLSDKGPFHRSQEYTDFVDRSRQGFSTRYKIYREFGRWKVNNLAVERRNFLGSPLPLAPEFFRNIRLLGRRPTLQQITENLIKKYGTHFLLSATLGGEESLTIFVDKRKLSKRAEGSDSTTNSSSVTLETLHQLAASYFIDRDSTLRRLHHIQIASTAIKVTETRTGPLGCSNYDNLDSVSSVLVQSPENKIQLQGLQVLLPDYLQERFVQAALSYIACNSEGEFICKENDCWCHCGPKFPECNCPSMDIQAMEENLLRITETWKAYNSDFEESDEFKLFMKRLPMNYFLNTSTIMHLWTMDSNFQRRYEQLENSMKQLFLKAQKIVHKLFSLSKRCHKQPLISLPRQRTSTYWLTRIQSFLYCNENGLLGSFSEETHSCTCPNDQVVCTAFLPCTVGDASACLTCAPDNRTRCGTCNTGYMLSQGLCKPEVAESTDHYIGFETDLQDLEMKYLLQKTDRRIEVHAIFISNDMRLNSWFDPSWRKRMLLTLKSNKYKSSLVHMILGLSLQICLTKNSTLEPVLAVYVNPFGGSHSESWFMPVNENSFPDWERTKLDLPLQCYNWTLTLGNKWKTFFETVHIYLRSRIKSNGPNGNESIYYEPLEFIDPSRNLGYMKINNIQVFGYSMHFDPEAIRDLILQLDYPYTQGSQDSALLQLLEIRDRVNKLSPPGQRRLDLFSCLLRHRLKLSTSEVVRIQSALQAFNAKLPNTMDYDTTKLCS

SEQ ID NO: 2516 - protein, 174 aa, Homo sapiens
MAGSVELQEIGGPLPGPSTHQEPLRGLPVGLCPCLPLWMEKAHIVPPVGANCRAQQGCMGPASMPLLLTHILSAPTPVHPLVSLSYLSLSCPHPSLFLSVLLLPFTLFVSPSLSVLPPSLSTLHLSLCVSISVSLSVSLPIPHPHSLSSPSSLPSCLPLIWFILLHPAAPPTEP

SEQ ID NO: 2517 - protein, 484 aa, Homo sapiens
MVHETSYSAQFKGEASKPTTADNKVIDRRRIRSLYSEPFKEPPKVEKPSVQSSKPKKTSASHKPTRKAKDKQAVSGQAAKKKSAEGPSTTKPDDKEQSKEMNNKLAEAKESLAQPVSDSSKTQGPVATEPDKDQGSVVPGLLKGQGPMVQEPLKKQGSVVPGPPKDLGPMIPLPVKDQDHTVPEPLKNESPVISAPVKDQGPSVPVPPKNQSPMVPAKVKDQGSVVPESLKDQGPRIPEPVKNQAPMVPAPVKDEGPMVSASVKDQGPMVSAPVKDQGPIVPAPVKGEGPIVPAPVKDEGPMVSAPIKDQDPMVPEHPKDESAMATAPIKNQGSMVSEPVKNQGLVVSGPVKDQDVVVPEHAKVHDSAVVAPVKNQGPVVPESVKNQDPILPVLVKDQGPTVLQPPKNQGRIVPEPLKNQVPIVPVPLKDQDPLVPVPAKDQGPAVPEPLKTQGPRDPQLPTVSPLPRVMIPTAPHTEYIESSP

SEQ ID NO: 2518 - protein, 367 aa, Homo sapiens [sequence omitted]

SEQ ID NO: 2519 - protein, 626 aa, Homo sapiens [sequence omitted]

SEQ ID NO: 2520 - protein, 169 aa, Homo sapiens
MGLVLPWSADDDSPSRATLGNMKQVWRVGCVPALVGPVGLEHAFRGSVWAEARPTTQCQSQRRGPTTKAKLDQVSIAMAQCAPWPLKIPLCRVCRDLDCKGPSLQVWKHLPIRALSPSGSGLQGAAGFTALQLGSQLSPRVLVEPSRGGWRVGFKGDGNTWGRSWNLVA

SEQ ID NO: 2521 - protein, 278 aa, Homo sapiens [sequence omitted]

SEQ ID NO: 2522 - protein, 518 aa, Homo sapiens
MVQLVLQYRDYQRATQRLAGIPELLNKLRQAPDFYVEMKWEFTSWVPLVSKMCPSDVYRVWKRGESLRVDTSLLGFEHVTWQRGRRSFIFKGQEAGALVMEVDHDRQVVHVETLGLTLQEPETLLAAMRPSEEHVASRLTSPIVSTHLDTRNVAFERNKCGIWGWRSEKMETVSGYEAKVYSATNVELVTRTRTEHLSDQDKSRSKAGKTPFQSFLGMAQQHSSHTGAPVQQAASPTNPTAISPEEYFDPNFSLESRNIGRPIEMSSKVQRFKATLWLSEEHPLSLGDQVTPIIDLMAISNAHFAKLRDFITLRLPPGFPVKIEIPLFHVLNARITFSNLCGCDEPLSSVWVPAPSSAVAASGNPFPCEVDPTVFEVPNGYSVLGMERNEPLRDEDDDLLQFAIQQSLLEAGTEAEQVTVWEALTNTRPGARPPPQATVYEEQLQLERALQESLQLSTEPRGPGSPPRTPPAPGPPSFEEQLRLALELSSREQEERERRGQQEEEDLQRILQLSLTEH

SEQ ID NO: 2523 - protein, 103 aa, Homo sapiens
MTAPARRSRSLRPGMWSPKEWWEPQPGRDAAAARARSPYPGHLWKPAHLLHQPFPNTVVPPLPSLLKNRIVWGSGIFWTPGTPIRLPLVPLLQSNEVCFGFVY

SEQ ID NO: 2524 - protein, 128 aa, Homo sapiens
MGTRSFCPIMGTRSFCPIVGSTLLLPNHWAHAPSARSLGSRSFCPILGARSFCPIVGRTLLLPDRWAHAPSARSLGARSFCPIVGSTLLLPDRWAHAPSARSLGARFFCLIVGRTLLLPDRWAHAPSA

SEQ ID NO: 2525 - protein, 131 aa, Homo sapiens
MASQPEATAGHHLGPASPPTRGRQSPPSLVGDGNRACCCHLAANSGNESRHAHYPATLPILTLYVKQNSRFRSELSEGVVPVLLVGKLRLREAEDLPKITPPGPRIQAQACPGSLWPPGCEEAARDQVPPF

SEQ ID NO: 2526 - protein, 842 aa, Homo sapiens [sequence omitted]

SEQ ID NO: 2527 - protein, 230 aa, Homo sapiens [sequence omitted]

SEQ ID NO: 2528 - protein, 473 aa, Homo sapiens
MALKDTGSGGSTILPISEMVSSSSSPGASAAAAPGPCAPSPFPEVVELNVGGQVYVTKHSTLLSVPDSTLASMFSPSSPRGGARRRGELPRDSRARFFIDRDGFLFRYVLDYLRDKQLALPEHFPEKERLLREAEYFQLTDLVKLLSPKVTKQNSLNDEGCQSDLEDNVSQGSSDALLLRGAAAAVPSGPGAHGGGGGGGAQDKRSGFLTLGYRGSYTTVRDNQADAKFRRVARIMVCGRIALAKEVFGDTLNESRDPDRQPEKYTSRFYLKFTYLEQAFDRLSEAGFHMVACNSSGTAAFVNQYRDDKIWSSYTEYIFFRPPQKIVSPKQEHEDRKHDKVTDKGSESGTSCNELSTSSCDSHSEASTPQDNPSSAQQATAHQPNTLTLDRPSKKAPVQWIPPPDKRRNSELFQTLISKSRETNLSKKKVCEKLSVEEEMKKCIQDFKKIHIPDYFPERKRQWQSELLQKYGL

SEQ ID NO: 2529 - protein, 230 aa, Homo sapiens
MDVGFQGRCSRWSRALRGRYSSAERKRRARQPREPREQAPRVSAPPGRLPAFFPQFALLPQSGPRLILCTCEWAHTSSPGTILSSISLGESTFLTINLLATAGKVAGCEWGGEGRFTRSEAPKLAASAKRLCFLRFLTNKWGGMLAWPPAAPARALGSLSSLMPSFRRSPAALTPGLLRPLAKVCSPMDAGRGLSLSALTQLRLKPQSSHLLPPVYPPAPLPPPKDVPLQ

SEQ ID NO: 2530 - protein, 602 aa, Homo sapiens
MESHSRAGKSRKSAKFRSISRSLMLCNAKTSDDGSSPDEKYPDPFEISLAQGKEGIFHSSVQLADTSEAGPSSVPDLALASEAAQLQAAGNDRGKTCRRIFFMKESSTASSREKPGKLEAQSSNFLFPKACHQRARSNSTSVNPYCTREIDFPMTKKSAAPTDRQPYSLCSNRKSLSQQLDCPAGKAAGTSRPTRSLSTAQLVQPSGGLQASVISNIVLMKGQAKGLGFSIVGGKDSIYGPIGIYVKTIFAGGAAAADGRLQEGDEILELNGESMAGLTHQDALQKFKQAKKGLLTLTVRTRLTAPPSLCSHLSPPLCRSLSSSTCITKDSSSFALESPSAPISTAKPNYRIMVEVSLQKEAGVGLGIGLCSVPYFQCISGIFVHTLSPGSVAHLDGRLRCGDEIVEISDSPVHCLTLNEVYTILSHCDPGPVPIIVSRHPDPQVSEQQLKEAVAQAVENTKFGKERHQWSLEGVKRLESSWHGRPTLEKEREKNSAPPHRRAQKVMTRSSSDSSYMSGSPGGSPGSGSAEKPSSDVDISTHSPSLPLAREPVVLSIASSRLPQESPPLPESRDSHPPLRLKKSFEILVRKPMSNIARPRSP

SEQ ID NO: 2531 - protein, 218 aa, Homo sapiens [sequence omitted]

SEQ ID NO: 2532 - protein, 140 aa, Homo sapiens
MRQVLRPVFQVLTGALGAHRREYGSAATGTVHLPVCQAQSMDKPHSRAVHPGTMHGQQESRPADAKRAYCQGKVPAPAHSLWILGLWGLSWRVSLWFVSGLQWWLTPLVRKHSWEVFCGSKHVAPIITGEQKALDTPFGM

SEQ ID NO: 2533 - protein, 339 aa, Homo sapiens
MEKGRLSVGDHVALVYPPGVDLIAAFYGCLYCGCVPVTVRPPHPQNLGTTLPTVKMIVEVGKSACVLTTQAVTRLLRSKEAAAAVDIRTWPTILDTDDIPKKKIASVFRPPSPDVLAYLDFSVSTTGILAGVKMSHAATSALCRSIKLQCELYPSRQIAICLDPYCGLGFALWCLCSVYSGHQSVLVPPLELESNVSLWLSAVSQYKARVTFCSYSVMEMCTKGLGAQTGVLRMKGVNLSCVRTCMVVAEERPRIALTQSFSKLFKDLGLPARAVSTTFGCRVNVAICLQVRCLGPAVLESWLLAAWRPSFPVVNVPFCSRLIYFSFSGPLISHFHVTF

SEQ ID NO: 2534 - protein, 148 aa, Homo sapiens [sequence omitted]

SEQ ID NO: 2535 - protein, 171 aa, Homo sapiens [sequence omitted]

SEQ ID NO: 2536 - protein, 881 aa, Homo sapiens
MPNSASRDEFPCGFTSPANRGSLSTDKDTAYGSFQNGHGIKREDSRGSLIPEGATGFPDQGNTGENTRQSSTRSSVSQYNRLDQYEIRSLLMCYLYIVKMISEDTLLTYWNKVSPQELINILILLEVCLFHFRYMGKRNIARVHDAWLSKHFGIDRKSQTMPALRNRSGVMQARLQHLSSLESSFTLNHSSTTTEADIFHQALLEGNTATEVSLTVLDTISFFTQCFKTQLLNNDGHNPLMKKVFDIHLAFLKNGQSEVSLKHVFASLRAFISKFPSAFFKGRVNMCAAFCYEVLKCCTSKISSTRNEASALLYLLMRNNFEYTKRKTFLRTHLQIIIAVSQLIADVALSGGSRFQESLFIINNFANSDRPMKATAFPAEVKDLTKRIRTVLMATAQMKEHEKDPEMLIDLQYSLAKSYASTPELRKTWLDSMAKIHVKNGDFSEAAMCYVHVAALVAEFLHRKKLFPNGCSAFKKITPNIDEEGAMKEDAGMMDVHYSEEVLLELLEQCVDGLWKAERYEIISEISKLIVPIYEKRREFEKLTQVYRTLHGAYTKILEVMHTKKRLLGTFFRVAFYGQSFFEEEDGKEYIYKEPKLTGLSEISLRLVKLYGEKFGTENVKIIQDSDKVNAKELDPKYAHIQVTYVKPYFDDKELTERKTEFERNHNISGFVFEAPYTLSGKKQGCIEEQCKRRTILTTSNSFPYVKKRIPINCEQQINLKPIDVATDEIKDKTAELQKLCSSTDVDMIQLQLKLQGCVSVQVNAGPLAYARAFLNDSQASKYPPKKVSELKDMFRKFIQACSIALELNERLIKEDQVEYHEGLKSNFRDMVKELSDIIHEQILQEDTMHSPWMSNTLHVFCAISGTSSDRGYGSPRYAEV

SEQ ID NO: 2537 - protein, 580 aa, Homo sapiens
MHLSAVFNALLVSVLAAVLWKHVRLREHAATLEEELALSRQATEPAPALRIDYPKALQILMEGGTHMVCTGRTHTDRICRFKWLCYSNEAEEFIFFHGNTSVMLPNLGSRRFQPALLDLSTVEDHNTQYFNFVELPAAALRFMPKPVFVPDVALIANRFNPDNLMHVFHDDLLPLFYTLRQFPGLAHEARLFFMEGWGEGAHFDLYKLLSPKQPLLRAQLKTLGRLLCFSHAFVGLSKITTWYQYGFVQPQGPKANILVSGNEIRQFARFMTEKLNVSHTGVPLGEEYILVFSRTQNRLILNEAELLLALAQEFQMKTVTVSLEDHTFADVVRLVSNASMLVSMHGAQLVTTLFLPRGATVVELFPYAVNPDHYTPYKTLAMLPGMDLQYVAWRNMMPENTVTHPERPWDQGGITHLDRAEQARILQSREVPRHLCCRNPEWLFRIYQDTKVDIPSLIQTIRRVVKGRPGPRKQKWTVGLYPGKVREARCQASVHGASEARLTVSWQIPWNLKYLKVREVKYEVWLQEQGENTYVPYILALQNHTFTENIKPFTTYLVWVRCIFNKILLGPFADVLVCNT

SEQ ID NO: 2538 - protein, 105 aa, Homo sapiens [sequence omitted]

SEQ ID NO: 2539 - protein, 107 aa, Homo sapiens
MAEEGSAAGGVMDINTVLQEVLKTALIHDGLAYEICKAAKASDKCQAHLCVLCVLASNCDEPMYVKLVEALCAEHQINLIKVDDQKLGESVGLCKTDREGKPCKVVG

SEQ ID NO: 2540 - protein, 304 aa, Homo sapiens
MFSVLSYGRLVARAVLGGLSQTDPRAGGGGGGDYGLVTAGCGFGKDFRKGLLKKGACYGDDACFVARHRSADVLGVADGVGGWRDYGVDPSQFSGTLMRTCERLVKEGRFVPSNPIGILTTSYCELLQNKVPLLGSSTACIVVLDRTSHRLHTANLGDSGFLVVRGGEVVHRSDEQQHYFNTPFQLSIAPPEAEGVVLSDSPDAADSTSFDVQLGDIILTATDGLFDNMPDYMILQELKKLKNSNYESIQQTARSIAEQAHELAYDPNYMSPFAQFACDNGLNVRGGKPDDITVLLSIVAEYTD

SEQ ID NO: 2541 - protein, 100 aa, Homo sapiens
MKSLLSPRLECSGVISAHCNLCLLSSSDSLASASHVAGITGAHHQTWLISSRDRVSPCWPGWSLTPDLRRSACLGLSKCWDYRHEPPRTAGKGLLDQNIQ

SEQ ID NO: 2542 - protein, 376 aa, Homo sapiens [sequence omitted]

SEQ ID NO: 2543 - protein, 210 aa, Homo sapiens
MKMILAWRLPLIYPHVSLFIPQLSGQTNIHLSKNFFLTNRARERSDTFINLREVLNRFKLPPGEYILVPSTFEPNKDGDFCIRVFSEKKADYQAVDDEIEANLEEFDISEDDIDDGFRRLFAQLAGEDAEISAFELQTILRRVLAKRQDIKSDGFSIETCKIMVDMLDSDGSGKLGLKEFYILWTKIQKYQVRSQRCGWICVGKHSVHML

SEQ ID NO: 2544 - protein, 563 aa, Homo sapiens [sequence omitted]

SEQ ID NO: 2545 - protein, 214 aa, Homo sapiens
MPPFPRGLKTHYVDLVPGSVRRWPQLWGWSMLPTHSSGKWGPRHRGSAPTAAPGALVFWEGLGVCTRRPGPGTSPGAGSQGHRVCGKRCGGRAGHRRVSRRRLQAGLSQSRRRGIPSRTGVLSPTAVISSRSGRGSKQNRLREAGLGQVGGAPPCMTATVGAFRRLTAVGASGEKRGGTAVSSCGAASNWHPGTGPVQRRHLQRAGQPGAGACA

SEQ ID NO: 2546 - protein, 893 aa, Homo sapiens [sequence omitted]

SEQ ID NO: 2547 - protein, 161 aa, Homo sapiens [sequence omitted]

SEQ ID NO: 2548 - protein, 165 aa, Homo sapiens
MSHVIWTLKMECSETHVQGSCAKLMSRTGLLMKLLSEQQEAKALNVEWDTDQQKTNYINENMEQNEQKEQKSSELMKEVPGYDYKNKLIFAISVTVILIILIIIFCFIEVKTIINSGFQNTILCLCGFRIHKLKTNVTFPLDILLLSFKAEVCFVLLLQCIFQDC

SEQ ID NO: 2549 - protein, 102 aa, Homo sapiens
MNNVSLDSLYAKVFILNMCPKIYALTDVIKIVQEINLSITYFVCTTVSYSALKWSFITKAWTLLQQSRGLLNSDLRSFVCLSQIIAHSQGNKESWWIEFSDY

SEQ ID NO: 2550 - protein, 161 aa, Homo sapiens
MKSLSVSSDFLGKDKPVSCGLARSVSGKTPGDFYDRRTTKPEFLRPGPRKTEDTYFISSAGKPTPGTQGKIKLVKESSLSRQSKDSNPYATLPRASSVISTAEGTTRRTSIHDFLTKDSRLPISVDSPPAAADSNTTAASNVDKVQESRNSKSRSREQQSS

SEQ ID NO: 2551 - protein, 184 aa, Homo sapiens
MPVKGASSLLFLPLPPSAWQLCLLSKRRVHPIRTPLPFHSWIKALVISNQKVPERERPESTGVLSDGCLGQSQEGEPLLSPPALAHFPLHARCCGSSWAWPGSAGEAIRMVSGAPFLCFLDGLDGLPCSSPMAALPAPMAALPARRQRQEHIEGGSQGCGVRSPAPCRGKPGSATSSTLRLCPA

SEQ ID NO: 2552 - protein, 151 aa, Homo sapiens
MSSSTSFILSAIASGFHYSLSAVTACGQLLLLTACRELPNFSSQFFLRSWLFWPQLKGVLLSSLRVLSLFDPIVVFSSFEHVFQYSYFNLLRTLKGNDKLVVGIWQTGACLFERSSRRDKIQSAICFSWRGKRENLLDYILVPWHTTYMFK

SEQ ID NO: 2553 - protein, 134 aa, Homo sapiens [sequence omitted]

SEQ ID NO: 2554 - protein, 132 aa, Homo sapiens
MIQFSKFELLMMHKMVSKIFTKSVTLFFLITFFSRRSFTLFAQAGVQWRHLGSLQLLPPGFKRFSCLSLPSSWDYRSLLPCLANFVFLVGMGFHHGGQAGLDLLTSSNPPTSASQSAMIIGVSHHAWPITLY

SEQ ID NO: 2555 - protein, 173 aa, Homo sapiens [sequence omitted]

SEQ ID NO: 2556 - protein, 710 aa, Homo sapiens [sequence omitted]

SEQ ID NO: 2557 - protein, 841 aa, Homo sapiens
MNLLYRKTKLEWRQHKEEEAKRSSSKEVAPAGSAGPAAGQGPGVRVRDIASLRRSLRMGFMTMPASQEHTPHPCRSAMAPRSLSCHSVGSMDSVGGGPGGASGGLTEDSSTRRPPAKPRRHPSTKLSMVGPGSGAETPPSKKAGSQKPTPEGRESSRKVPPQKPRRSPNTQLSVSFDESCPPGPSPRGGNLPLQRLTRGSRVAGDPDVGAQEEPVYIEMVGDVFRGGGRSGGGLAGPPLGGGGPTPPAGADSDSEESEAIYEEMKYPLPEEAGEGRANGPPPLTATSPPQQPHALPPHAHRRPASALPSRRDGTPTKTTPCEIPPPFPNLLQHRPPLLAFPQAKSASRTPGDGVSRLPVLCHSKEPAGSTPAPQVPARERETPPPPPPPPAANLLLLGPSGRARSHSTPLPPQGSGQPRGERELPNSHSMICPKAAGAPAAPPAPAALLPGPPKDKAVSYTMVYSAVKVTTHSVLPAGPPLGAGEPKTEKEISVLHGMLCTSSRPPVPGKTSPHGGAMGAAAGVLHHRGCLASPHSLPDPTVGPLTPLWTYPATAAGLKRPPAYESLKAGGVLNKGCGVGAPSPMVKIQLQEQGTDGGAFASISCAHVIASAGTPEEEEEEVGAATFGAGWALQRKVLYGGRKAKELDKVEDGARAWNGSAEGPGKVEREDRGPGTSGIPVRSQGAEGLLARIHHGDRGGSRTALPIPCQTFPACHRNGDFTGGYRLGRSASTSGVRQVVLHTPRPCSQPRDALSQPHPALPLPLPLPPQPARERDGKLLEVIERKRCVCKEIKARHRPDRGLCKQESMPILPSWRRGPEPRKSGTPPCRRQHTVLWDTAI

SEQ ID NO: 2558 - protein, 109 aa, Homo sapiens
MNMLVICLYLVFICIAIFEHSKIAEHERVYLCDSLISAALGLSKRCKERDICITSTSSTSTTTSSSLASCEHRGTCPALVSGCEWHEPRGLAQLHPEFPKRNFEESQNL

SEQ ID NO: 2559 - protein, 210 aa, Homo sapiens
MPRSLRPPCPGSTLRWLPGGRTPFPHHVSCQPRRSSGEREAEAQSGAAPPGPSPLPPPPPHPIPSSTTSAQAWLLAKSRHRGRRGRGKRMIPPQNGVSRKKRECRARRDSWGRGAPAGPAEGRRNGLSEGQAEGRTPTVDPSYAPCRGGAGRRRCTRLPAACGRRSPRARGSRKPRSSRTRGPGKKRRGPQPASLAPPRFPPQSGVPLRL

SEQ ID NO: 2560 - protein, 163 aa, Homo sapiens
MPHPRPPSTPPPRPLSTPCPQLPLLAPVPAFLSHPPVSIFLLCSHPLSLSVSLLFLFSVSPSDHLTPLACCLASSLSPFLSLFVSSLFLTHFLYLAASPCFRLSVSLFPPPLSLPRSPISVSPPWCLLLTQESKPFFPRGWAKQPQPGPFSATRFLTWGPSAP

SEQ ID NO: 2561 - protein, 157 aa, Homo sapiens [sequence omitted]

SEQ ID NO: 2562 - protein, 132 aa, Homo sapiens
MQVIHGPHVEKLQSPLGPHRPSPHCPLSVVTGPDLQECTFHSTRKPYDILRLPRPAACMGPLPSSTPTLRMVPCSALVLCWPLPATPTLRHPGVVGPNWLAPPSAALCRPDAAVWPDLPSSNILLVTPPPAK

SEQ ID NO: 2563 - protein, 142 aa, Homo sapiens [sequence omitted]

SEQ ID NO: 2564 - protein, 218 aa, Homo sapiens [sequence omitted]

SEQ ID NO: 2565 - protein, 196 aa, Homo sapiens
MRYTTVPSVRPTALATKKLDLWRLPPFLIIHLKRFQFVNDQWIKSQKIVKFPRESFDPSAFLVPRDPALCQHQPLTPQGDELSKPRILAREVKKVDVQSLAGEEDMLLSKSPSSLSANISSSPKGSPSSPRKSGTSCPSSKNSSPNSCPRTLGRSKGRLRLPQIGSKNKLSSSKKNLDASKENGAGQICELADALS

SEQ ID NO: 2566 - protein, 138 aa, Homo sapiens [sequence omitted]

SEQ ID NO: 2567 - protein, 229 aa, Homo sapiens
MAALMAQVEYGDLEKPALPGPGGTSPAKAQHLLQQVLDRFHPRRYRHGAPAEQLRHLADMLTTKWATLQGCSPPECIRIYLTVARKWPFFGAKLFAAQPAQLSSKENALVWIAVNEDGVSILDHNTMQVHITYPYSSVTTFGGCRDDFMLVIRSIPDKSSGKSHIEKLIFRMAAPKIAEATFIMASYMNHCTTTVNPPTNPPGACQLWELDGRQFFSSVSCATKGPTLL

SEQ ID NO: 2568 - protein, 152 aa, Homo sapiens
MAAENEASQESALGAYSPVDYMSITSFPRLPEDEPAPAAPLRGRKDEDAFLGDPDTDPDSFLKSARLQRLPSSSSEMGSQDGSPLRETRKDPFSAAAAECSCRQDGLTVIVTACLTFATGVTVALVMQIYFGDPQVRGTNGEGEETGEWGVG

SEQ ID NO: 2569 - protein, 186 aa, Homo sapiens [sequence omitted]

SEQ ID NO: 2570 - protein, 221 aa, Homo sapiens
MSYGRPPPDVEGMTSLKVDNLTYRTSPDTLRRVFEKYGRVGDVYIPRDRYTKESRGFAFVRFHDKRDAEDAMDAMDGAVLDGRELRVQMARYGRPPDSHHSRRGPPPRRYGGGGYGRRSRSPRRRRRSRSRSRSRSRSRSRSRYSRSKSRSRTRSRSRSTSKSRSARRSKSKSSSVSRSRSRSRSRSRSRSPPPVSKRESKSRSRSKSPPKSPEEEGAVSS

SEQ ID NO: 2571 - protein, 244 aa, Homo sapiens
MAVIPESAWKHPDYVDDGLSGVCNGLEQPRKQQRSDLNGPVDNNNIPETKKVASFPSFVAVPGPCEPEDLIDGIIFAANYLGSTQLLSERNPSKNIRMMQAQEAVSRVKNSEGDAQTLTEVDLFISTQRIKVLNADTQETMMDHALRTISYIADIGNIVVLMARRRMPRSASQDCIETTPGAQEGKKQYKMICHVFESEDVSKPLPGHSPPKVHSPGRLQDPGAVETTLRWKASMLLLMFPVDQ

SEQ ID NO: 2572 - protein, 195 aa, Homo sapiens
MMPPPGIPPPFPPMGLPPMSQRPPAIPPMPPGILPPMLPPMGAPPPLTQIPGMVPPMMPGMLMPAVPVTAAVSTRGQQVAGSALQSRESDLECRTMTSILSLFSSHPPRSPAALPTLKSFSPAMYSALLVSHSSPKAYTFSCYSRALSSSLKEHTYPHRATHCGHMNIVLHILFVPRRVSSTWGSCCAFLCYRSV

SEQ ID NO: 2573 - protein, 129 aa, Homo sapiens
MDIRSAAGLRVLAVNILGRFLLNSDRNIRYVALTSLLRLVQSDHSAVQRHRPTVVECLRETDASLSRRALELSLALVNSFNVRAMMQELQAFLESCPPDLRADCASGILLAAERHHPACADNGGHPCAG

SEQ ID NO: 2574 - protein, 192 aa, Homo sapiens
MEDSAVPTPDSREAGVWTVPHLNPHSLCLPLPRLAKKSWFGNFISLEKEEQIFVVIKDKPLSSIKADIVHAFLSIPSLSHSVISQTSFRAEYKATGGPAVFQKPVKFQVDITYTEGGEAQKENGIYSVTFTLLSGPSRRFKRVVETIQAQLLSTHDPPAAQHLSEPPPPAPGLSWGAGLKGQKVATSYESSL

SEQ ID NO: 2575 - protein, 256 aa, Homo sapiens
MNPGGRACSEPRLRHATALQPGRQSETPSQKKKKKFKDFIIETEITFDLCSFLSSSKSPGTSMTPSSGSFPSAYDQQSSKDSRQGQWQRRRRLDGALNRVPVGFYQKVWKVLQKCHGLSVEGFVLPSSTTREMTPGEIKFSVHVESVLNRVPQPEYRQLLVEAILVLTMLADIEIHSIGSIIAVEKIVHIANDLFLQEQKTLGADDTMLAKDPASGICTLLYDSAPSGRFGTMTYLSKAAATYVQEFLPHSICAMQ

SEQ ID NO: 2576 - protein, 101 aa, Homo sapiens
MGWVGVVQVPCMGSTALKRVQRPHLRVSARAGFRASLASWALCLSHSDSNMITCSEQPHLSKQGENTSATFKNMSPGIKKKTRKASFSSLVGKSSLLTASS

SEQ ID NO: 2577 - protein, 100 aa, Homo sapiens [sequence omitted]

SEQ ID NO: 2578 - protein, 239 aa, Homo sapiens [sequence omitted]

SEQ ID NO: 2579 - protein, 243 aa, Homo sapiens [sequence omitted]

SEQ ID NO: 2580 - protein, 100 aa, Homo sapiens
MVNIRKAVKKEMERSVGMVNSQRREAGLAWSQQPGVQHSHSPQKEQKATCALFCRCAFPTPPWGPLAQFSLAVSLPDTHFPEASQVISHHMSPRKEVFGT

SEQ ID NO: 2581 - protein, 169 aa, Homo sapiens [sequence omitted]

SEQ ID NO: 2582 - protein, 105 aa, Homo sapiens
MLAAKQSYKMCLDLIFPWTQPQDGPARLWRSWDSKVSLPVCSGIGSWSWGEGSIWGSALPPPGPFLFLISSQSLMQQQSKFSFSTDSGLEFSTNCLHLPGHIPNR

SEQ ID NO: 2583 - protein, 180 aa, Homo sapiens
MACGATLKRPMEFEAALLSPGPTPGLRPPDAEPPPPFQTQTPPQSLQQPAPPGSERRLPTPEQIFQNIKQEYSRYQRWRHLEVVLNQSEACASESQPHSSALTAPSSPGSSWMKKDQPTFTLRQVGIICERLLKDYEDKIREEYEQILNTKLAEQYESFVKFTHDQIMRRYGTRPTSYVS

SEQ ID NO: 2584 - protein, 113 aa, Homo sapiens
MCLFPRQHLDLAAWSQGLSPPRRVPSSGVGGRPTLPQGVPFDGKCSQQRGGVWATFRRWMWWPRPRPRRVMAFPFCRCGQVGLGPVLGPLLAVCEGPGGRRGPDSIPIKHTGT

SEQ ID NO: 2585 - protein, 179 aa, Homo sapiens
MFESPGWAVFAFLDNDCQHQQGCLRMHALVLGPESQRELPLLARAQAAVEEQHPQGSVDGKDAWLRAGDGVPDESVPPTVSVFRTCEVQGCARGRGLGYSNLIRGPEERWVVVIDIHDCYVDLGAAAGWGAAELRLHREHNHGLRLVIQGLPGANSAQPRVNGELSAEITRRNPVKDWF

SEQ ID NO: 2586 - protein, 306 aa, Homo sapiens
MLAKQYGHMKIVALMDTYSPSLPKSLYRSPEKYEDLSSSDESCPAPQRQRPCRKKGVSIHEGPRALARITGIGLGGRAPRPRYEQAPPRGYVTFNSSGENPLEEEGLCCRDVTSPINERDVESSSSSSSREEHAFCANLGPVQSSSSSEGLARAQGLSSEASVESNEDSDHACKSSARKQAKSYMKTKNPDSQWPPRAATDREGFLAESSPQTQRAPYSGPQVRPLVKLEVTLRDGTFCDLGGMCCVYDVPGAARRTEWRWHPHGLLGSTGSQPAPWLAAPLQRFYSVPLHGKDLSPCFPYWSWPP

SEQ ID NO: 2587 - protein, 443 aa, Homo sapiens
MTHTLPSSYHNDARSSLSVSLEPESLGLGSANSSQDSLHKAPKKKGIKSSIGRLFGKKEKARLGQLRGFMETEAAAQESLGLGKLGTQAEKDRRLKKKHELLEEARRKGLPFAQWDGPTVVAWLELWLGMPAWYVAACRANVKSGAIMSALSDTEIQREIGISNPLHRLKLRLAIQEMVSLTSPSAPPTSRTCPVFLQTLAYGDMNHEWIGNEWLPSLGLPQYRSYFMECLVDARMLDHLTKKDLRVHLKMVDSFHRTSLQYGIMCLKRLNYDRKELERRREASQHEIKDVLVWSNDRVIRWIQAIGLREYANNILESGVHGSLIALDENFDYSSLALLLQIPTQNTQARQILEREYNNLLALGTERRLDESDDKNFRRGSTWRRQFPPREVHGISMMPGSSETLPAGFRLTTTSGQSRKMTTDVASSRLQRLDNSTVRTYSC

SEQ ID NO: 2588 - protein, 183 aa, Homo sapiens
MREYKVVVLGSGGVGKSALTVQFVTGTFIEKYDPTIEDFYRKEIEVDSSPSVLEILDTAGTEQFASMRDLYIKNGQGFILVYSLVNQQSFQDIKPMRDQIVRVKRYEKVPLILVGNKVDLEPEREVMSSEGRALAQEWGCPFMETSAKSKSMVDELFAEIVRQMNYSSLPEKQDQCCTTCVVQ

SEQ ID NO: 2589 - protein, 114 aa, Homo sapiens [sequence omitted]

SEQ ID NO: 2590 - protein, 101 aa, Homo sapiens [sequence omitted]

SEQ ID NO: 2591 - protein, 174 aa, Homo sapiens
MRPSPVGLRDRKHMLGQGYTHTHTHTHTHTHSGAGMDMNNNLSPNCWLEQDVGCKHRQASNTPPLGLRCPHAVTQPALHTCVSQLHTLPGCTRTSRAGRSHPHPTLQNPLPQPHSLPLGLACLGSLGLATPAPKIGGPARPGVRPGGKEWGTLTPIGLSPAERRPPNVLLCPGG

SEQ ID NO: 2592 - protein, 180 aa, Homo sapiens
MYTHIHMCICMYTHMHMCTYVCIHIHICVHIYICMYTHRYMCTRKHMYTHKHMYVYTYIYVYTYTYVCVHIHICVHIYLCMYTHTYMCAHIHMCVYTYIYVYIYTHIHICVHINMYVSIYVYIYTCIQIYIYMYTLYVCTYTYMCTYIHICIHTSIIYVCVYIHIQCPLNIYIYLVCMCV

SEQ ID NO: 2593 - protein, 108 aa, Homo sapiens [sequence omitted]

SEQ ID NO: 2594 - protein, 112 aa, Homo sapiens
MIPGPRFHRAETSHWYCSVVCHAKPLTYRLHEHGLFMQLSFRVIYCADIITRTTLQFPSYVLLSYILSVLCVLILLSCTLMFFNSKTLYSQCLCLYIHIYIKLSLLFIIFCI

SEQ ID NO: 2595 - protein, 141 aa, Homo sapiens
MFGSSRGGVRGGQDQFNWEDVKTDKQRENYLGNSLMAPVGRWQKGRDLTWYAKGRAPCAGPSREEELAAVREAEREALLAALGYKNVKKQPTGLSKEDFAEVCKREGGDPEEKGVDRLLGLGSARCGRVSRGGQHWARLLG

SEQ ID NO: 2596 - protein, 189 aa, Homo sapiens
MHTYIYMCVYPYICIYMHVYPCICIYLHVYTYICMYIHIYPYLCMYVHIYPYICTCIYTHICMRVHVYAYMYVRTYIHIMCMHVCVYVCVHACMCVCTCAYTHVFVCVRVRTCVYMRTHTHICVYACACAHMCVCVRVHTYVCMRAYIHAYMYVRTYICIFMFYVYVFYMYIYLHILHYFHEEIGAQGS

SEQ ID NO: 2597 - protein, 258 aa, Homo sapiens
MWRYRSWDVPQIPSEAPQTQKAITKSGLQHLAPPPPTPGAPCSESERQIRSTVDWSESATYGEHIWFETNVSGDFCYVGEQYCVARMLVSARRGTPPPAGGASSRSPSGNVGLSPLPGTPAVGRPRMVRGAGALSGCQDWGFPVHTKGSCAGAGSLRDRLTWCLRGPLFLSCSRSQCLEESAQPARLWCTRPASSSWRRWVGSSALPAPALWVLRPFQRALTPTCYTNGLPGVTQHSGVKSQGPWSQMPAFESWLLTD

SEQ ID NO: 2598 - protein, 159 aa, Homo sapiens [sequence omitted]

SEQ ID NO: 2599 - protein, 127 aa, Homo sapiens
MEAGPHPRPGHCCKPGGRLDMNHGFVHHIRRNQIARDDYDKKVKQAAKEKVRRRHTPAPTRPRKPDLQVYLPRHRGEAARPACLQPARSSCNALPFSIGKNHFLLLRFSSSRLFPEPPPQRSQISAE

SEQ ID NO: 2600 - protein, 154 aa, Homo sapiens
MPVGERGFARVYVFFKTVDLYNWKSHSKGLWVSPREFVTLIWRIFSTHNPTWPGVQTVTATLLTAEDKSATMAKTKEEADNMCADNLVTWPVEVSVPIANPNWDPSDNKNQEWLHHYRNMLLRGMREASQSLVNWGNLREIEQGPNENPSAFLN

SEQ ID NO: 2601 - protein, 104 aa, Homo sapiens
MVSFSTGPSRHPSLISSDSNNLKLNNVRLPRENMSLPSNLQLNDLTPDSRAVKPADRQMAQNNSRPELLDPEPGGLLTSQGFIRLPVLGYIYRVSSVSSDEIWL

SEQ ID NO: 2602 - protein, 888 aa, Homo sapiens [sequence omitted]

SEQ ID NO: 2603 - protein, 136 aa, Homo sapiens
MPGGGNLRSGKNFVLFPEKKKKKKKDHRVRRNFFFLRWRLLSPRLECSGAISAHCNFCLPGSSNSPASASRIAGITGAHHHAWLIFVFLVDTGFHQVGQTCLKLLTSSDLPASASQSAGITGMSHYARRERDINLK

SEQ ID NO: 2604 - protein, 104 aa, Homo sapiens
MVSTWRPKEAASRARDIATEVSPWLAASASASAPSWMEDEGSNSGKQRPREAADFSIPPSGFRLGRCTAVRGRAHVGSQCVQECVYLEECVCECVPGPVLVCRC

SEQ ID NO: 2605 - protein, 164 aa, Homo sapiens [sequence omitted]

SEQ ID NO: 2606 - protein, 187 aa, Homo sapiens
MAAAGPMTGAAASRAATAAHCSGGSKVEAVRGAVQGAAGVKPPVAAAPSLLWLCPPGPPVLLDPLPSWTLCPPGPPSLLGPPGPPALLDPLSSWTPCPPGPPVCGPCSSPPSPTHDWTPRSAAGVWALGVLWASRCLGTITGSRAHTQPLLPEHTRGSRHPDESTVPAMVFRDGEGSLSSAGTLQPG

SEQ ID NO: 2607 - protein, 101 aa, Homo sapiens
MEDERILDNLGAEGLHGSEWEWRRWHFGGWVEEEHRHRWPRGVWSTDKSPGGVQPQCLSQEVSALVSGTQSSLRNGLGDKWSACCTRALGECAWSCLSGHH

SEQ ID NO: 2608 - protein, 101 aa, Homo sapiens
MSLLKSYCKLRANCNLLFLFVARGLHRSLNICFPCHPAFRGWPAIHTPNPPCVSDSWPHVNFCTCLFLGGVEANPFSSEASGFCFFSGLWVEGKTPKAPLS

SEQ ID NO: 2609 - protein, 546 aa, Homo sapiens [sequence omitted]

SEQ ID NO: 2610 - protein, 347 aa, Homo sapiens [sequence omitted]

SEQ ID NO: 2611 - protein, 127 aa, Homo sapiens
MIAGSGTRAHARARLWDPWLIDGPCSPRNLVPAAPSAPRTAVRLSRLVPAGNSVRCGALDAAPGQRSGPTVAAGFPQGGARARATPRRLPGHRRPRGARGAQRGGSPDSAHGSRPAEAGVSAQCREM

SEQ ID NO: 2612 - protein, 135 aa, Homo sapiens
MAASGRGLCKAVAASPFPAWRRDNTEARGGLKPEYDAVVIGAGKVVKQAGPELRGGKTALLRAWWGGGGGAKPHCSLLWHNPARSLYASRGCNGKPFHLAGRHLGFRCWLCCVAWGKCLPSLGLDLPMENDRKTR

SEQ ID NO: 2613 - protein, 575 aa, Homo sapiens [sequence omitted]

SEQ ID NO: 2614 - protein, 100 aa, Homo sapiens [sequence omitted]

SEQ ID NO: 2615 - protein, 144 aa, Homo sapiens; identical to SEQ ID NO: 2511

SEQ ID NO: 2616 - protein, 440 aa, Homo sapiens
MAVREKVFDVIIRCFKRHGAEVIDTPVFELKETLMGKYGEDSKLIYDLKDQGGELLSLRYDLTVPFARYLAMNKLTNIKRYHIAKVYRRDNPAMTRGRYREFYQCDFDIAGNFDPMIPDAECLKIMCEILSSLQIGDFLVKVNDRRILDGMFAICGVSDSKFRTICSSVDKLDKVSWEEVKNEMVGEKGLAPEVADRIGDYVQQHGGVSLVEQLLQDPKLSQNKQALEGLGDLKLLFEYLTLFGIDDKISFDLSLARGLDYYTGVIYEAVLLQTPAQAGEEPLGVGSVAAGGRYDGLVGMFDPKGRKVPCVGLSIGVERIFSIVEQRLEALEEKIRTTETQVLVASAQKKLLEERLKLVSELWDAGIKAELLYKKNPKLLNQLQYCEEAGIPLVAIIGEQELKDGVIKLRSVTSREEVDVRREDLVEEIKRRTGQPLCIC

SEQ ID NO: 2617 - protein, 175 aa, Homo sapiens
MPQWLVASIIPGCVCESVSRGDSHVSQRAEKETRSQCECALSNQLKARLGTNRQKKEDSLSHLSGAGCLFSLDIRLQGLWLLDSRTCTNGLPGPSGLQPPTKVCAVGLPDSEASGLGLRHATGFSDSPACGWPIMGLLHLCNHKGQCPLIPFFSYILLVLSAWGTLTNTDMEHLK

SEQ ID NO: 2618 - protein, 116 aa, Homo sapiens
MGEMHRHACEAWGPSLPLPCPLSPPTPGQPQERGSVASLAQRRGSVATWTPASGTAERPLRNADPPSRLKHTLRLPLLPLEFGSSFLTQTHSCSGGQGGRDTHAASLLPPRAGDCP

SEQ ID NO: 2619 - protein, 614 aa, Homo sapiens
MMRQATMDFSTPSVFDQQRGDSSEEVDLTMVYQAASNGDVNALTAVIREDPSILECCDSEGCTPLMHAVSGRQADTVKLLLKMGANINMQDAYGRTSLCLATYLGWLEGCVSLLRNGAKHNIPDKNGRLPLHAATAEPDMRLLTVLLQQSNISEINHQDNEGMTPLHWAAFHNQPQHTQMLLKKGADPTLVDKDFKTALHWAVQSGNRILCSIILSHHQGPSIINYDDESGKTCVHIAAAAGFSDIIHELARVPECNLQALDVDDRTPLHWAAAAGKAECVQSLLELGMDSNLRDINESTPLAYALYCGHTACVKLLSQESRTEPTRPPPSQSSRPQKKERRFNVLNQIFCKNKKEEQRAHQKDPSRDRYREEDTSEVNDIITTFDSIVGTNCQEQPGDQVAMVEFKKKTSDNSKYLLPEKKPLARKGLPPIRTQSLPPITLGNNFLTASHRATSHAGLSSAPHHMAQRSQKSRSEQDLLNNRTGCQMLLDNPWKSDSNQVFSYKVWTVSSSDKLLDRLLSVRPGHQEVSVPPHLRHLHNPSSGQNFQHLSPNRHKIRDLPFTRNNLAPLPDQKFLSGEPLRTNRVLPAIPSQRRHSTAAEESEHSANPTSDEN

SEQ ID NO: 2620 - protein, 126 aa, Homo sapiens
MRYHLTPVRMAIIKKSGNNRCWRGCGEIGTLLHCWWDCKLVQPLWKSVWRFLRDLELEIPFDPAIPLLGIYPNEYKSCCYKDTCTRMFIVALFTIAKTWNQPRCPSVVDLIKKIWYIYIMGYYTAI

SEQ ID NO: 2621 - protein, 129 aa, Homo sapiens
MLWYGLLGYLRLPCKQLWPDWIPGRGQQTKECSVGSASSDLQDHPAEIRSNSSPRAKVSYGRKLSLWKWPSMATLYYRCSCTKPSGYHMSWVAAPPLCLSSGCCISETCRPAITQCSPTRMEDLCFWPN

SEQ ID NO: 2622 - protein, 121 aa, Homo sapiens [sequence omitted]

SEQ ID NO: 2623 - protein, 193 aa, Homo sapiens
MVWDVGTGAAMLTLGPEVHPDTIYSVDWSRDGGLICTSCRDKRVRIIEPRKGTVVAEKDRPHEGTRPVRAVFVSEGKILTTGFSRMSERQVALWDTVSAGAGSRGPPGWEPRLEVSSLLCHSPGRMAMGLSLPRREMVVPTGWSGGPSQVTAQGRPPSQGLGCYLSPVSTEAPGGAAVPAGAGHQQRCPAALL

SEQ ID NO: 2624 - protein, 101 aa, Homo sapiens
MLHCFLWPSSCLGPDVHPGWWLQVGHPVLLCISIQSPISTQNSSVPQRSSLETGRLTSSPTAEPPEATWQNAIQDCTWHSAAVSQWDPSIQNGSSVFLLLS

SEQ ID NO: 2625 - protein, 243 aa, Homo sapiens
MRSAAFTIPSLKQRSPRCSTGRAELGKGEPSPCTGRPEQRGRRKSSLAPPAPTPDAGPQTSKDLEPPPHGCQEADRGGSWGATTSRPFRQNLSDLGRHSVLPLKRNLCPGGSSLGAPPLRTPQRRVTLAAQRWLSRPQRRAVGLGELDQGAQLAALGLRWGVDSLGGCPRASQPAGHSGLHHTLTCLRRHLALQAGASGHAGQLPQRASAAWEQQGQSYTALHLAAMYLGDGEAASGNIGRRC

SEQ ID NO: 2626 - protein, 342 aa, Homo sapiens
MLQDPRSQLRQFSHIKMDITLTKPNFAKHIVWAPEDLLPVPLPKPDPVSSINLPLPPLIADQRLNRLWNTKSDLHQNTVSIDPKLAAKAKINTTNREGYLEQFGDSHGSGAKLGDPRLQKNFDPRLHRLPNTESHQVVMKDSHASKGAPHLPRSNPGSSQPSGAGTSNSGSGALPPYAPKLSSSAGLPLGTSTSVLSGISLYDPRDHGSSSTSELATASSGENSKNQKKSGGLKSSDKTEPSPGEAILPQKPSPNVGVTLEGPADPQADVPRSSGKVQVPAVHSLPVQALTGLIRPQYSDPRQARQPGQGSPTPDNDPGRETDDKSLKEVFKTFDPTASPFC

SEQ ID NO: 2627 - protein, 152 aa, Homo sapiens
MMNPRAKRDFYLAAPDLLDPKSAAQNSKPRLSFSTKPTVLASRVESDTTINVMKWKTVSTIFLVVVLYLIIGATVFKALEQPHEISQRTTIVIQKQTFISQHSCVNSTELDELIQDLETSHHAQKAAKYSVSSMPYWEFPSLVFSWLELEIS

SEQ ID NO: 2628 - protein, 112 aa, Homo sapiens
MRSKKPKKHPKVAVKAKPSPRLTIFDEEVDPDEGLFGPGRKLSPQDPSEDVSSMDPLKLFDDPDLGGAIPLGDSLLLPAACESGGPTPSLSHRDASKELFRYHLSPAALGQL

SEQ ID NO: 2629 - protein, 207 aa, Homo sapiens
MAKRSKMLSLNNYSVPQSTREEKRENGLEARSPAINLMGFNVEEMCEAHAWIQRILSLQNHHIIENNHILYLGRKEHDILSQLQKTSSVSITEIISPGRTELEIEGARADLIEVVMNIEDMLCKVQEEMARKKERGLWRSLGQWTIQQQKTQDEMKENIIFLKCPVPPTQELLDQKKQFEKCGLQVLKVYLTKGKIWLILLLINLFL

SEQ ID NO: 2630 - protein, 452 aa, Homo sapiens [sequence omitted]

SEQ ID NO: 2631 - protein, 312 aa, Homo sapiens [sequence omitted]

SEQ ID NO: 2632 - protein, 167 aa, Homo sapiens
MAALSSRCPRSAAGPAYLQEAARSAHWASPPLVPLRTFQSSLFSSGSSHSREEEEEGVSLLRTALVGQGPVPLFLGSLFCAGCRQGPSVWSCGEPVPRRIWVTASVTPSPRQALHPCSDSLDILKALHLLPAAFSPFIWVQVFAEPSNKESRGENDGGEERESANIY

SEQ ID NO: 2633 - protein, 604 aa, Homo sapiens
MFSQSELRTIEQSLLATRVGSIAELSDLVSRAMHHLQPLNAKHHGNGTPLHHKQGALYWEPEALYTLCYFMHCPQMEWENPNVEPSKVNLQVERPFLVLPPLMEWIRVAVAHAGHRRSFSMDSDDVRQAARLLLPGVDCEPRQLRADDCFCASRKLDAVAIEAKFKQDLGFRMLNCGRTDLVKQAVSLLGPDGINTMSEQGMTPLMYACVRGDEAMVQMLLDAGADLNVEVVSTPHKYPSVHPETRHWTALTFAVLHGHIPVVQLLLDAGAKVEGSVEHGEENYSETPLQLAAAVGNFELVSLLLERGADPLIGTMYRNGISTTPQGDMNSFSQAAAHGHRNVFRKLLAQPEKEKSDILSLEEILAEGTDLAETAPPPLCASRNSKAKLRALREAMYHSAEHGYVDVTIDIRSIGVPWTLHTWLESLRIAFQQHRRPLIQCLLKEFKTIQEEEYTEELVTQGLPLMFEILKASKNEVISQQLCVIFTHCYGPYPIPKLTEIKRKQTSRLDPHFLNNKEMSDVTFLVEGRPFYAHKVLLFTASPRFKALLSSKPTNDGTCIEIGYVKYSIFQLVMQYLYYGGPESLLIKNNEIMEVRDPLWCWLS

SEQ ID NO: 2634 - protein, 148 aa, Homo sapiens [sequence omitted]

SEQ ID NO: 2635 - protein, 150 aa, Homo sapiens
MCLLCPFPIGKAISVRLQYFKHETKQSICLGNQKSPLVCPFFGEQGLDSSSSLDLPSSPHPAPTLCPCVQPPRGPVSVSVPVSVMGSRLAPLLSACLFVSVILGRMVILKNPGVLGQRQAGPSPGAPGLPSPSVRAPLGHKCSERSPSAT

SEQ ID NO: 2636 - protein, 454 aa, Homo sapiens
MRTVPQFTTFAATRFKPSSTSSTRTSSPCSPVSAKEGPTLSVPMVQGECLLKYQLRPRREWQRDAIITCNPEEFIVEALQLPNFQQSVQEYRRSAQDGPAPAEKRSQYPEIIFLGTGSAIPMKIRNVSATLVNISPDTSLLLDCGEGTFGQLCRHYGDQVDRVLGTLAAVFVSHLHADHHTGLPSILLQRERALASLGKPLHPLLVVAPNQLKAWLQQYHNQCQEVLHHISMIPAKCLQEGAEISSPAVERLISSLLRTCDLEEFQTCLVRHCKHAFGCALVHTSGWKVVYSGDTMPCEALVRMGKDATLLIHEATLEDGLEEEAVEKTHSTTSQAISVGMRMNAEFIMLNHFSQRYAKVPLFSPNFSEKVGVAFDHMKVCFGDFPTMPKLIPPLKALFAGDIEEMEERREKRELRQVRAALLSRELAGGLEDGEPQQKRAHTEEPQAKKVRAQ

SEQ ID NO: 2637 - protein, 378 aa, Homo sapiens [sequence omitted]

SEQ ID NO: 2638 - protein, 101 aa, Homo sapiens
METILASFCIFSGDGSSPCWPGCSQTPDLKSACLRLPRCWDYRHEPGLDDLFNVLLNLVCWSCFVTQAGVQWHNLGLLQALNSWAQVILLSQSFKVLVLQV

SEQ ID NO: 2639 - protein, 383 aa, Homo sapiens
MVSSGCRMRSLWFIIVISFLPNTEGFSRAALPFGLVRRELSCEGYSIDLRCPGSDVIMIESANYGRTDDKICDADPFQMENTDCYLPDAFKIMTQRCNNRTQCIVVTGSDVFPDPCPGTYKYLEVQYECVPYRHSLNNARDTSAMDTLPLNGNFNNSYSLHKGDYNDSVQVVDCGLSLNDTAFEKMIISELVHNNLRGSSKTHNLELTLPVKPVIGGSSSEDDAIVADASSLMHSDNPGLELHHKELEAPLIPQRTHSLLYQPQKKVKSEGTDSYVSQLTAEAEDHLQSPNRDSLYTSMPNLRDSPYPESSPDMEEDLSPSRRSENEDIYYKSMPNLGAGHQLQMCYQISRGNSDGYIIPINKEGCIPEGDVREGQMQLVTSL

SEQ ID NO: 2640 - protein, 162 aa, Homo sapiens
MEYESQKEKEVSVSDVNSITAQRINSANFLKKVRRLIMKRIVKISKCNLSDIVNDYEEIVSTSQLTDAVCKFVEPRRKLKPQRKERKKVTAQAISDGDIKILVRIVRAYNIPTRKTTINGFCCQLPYSMPLTLSVLEAERWRKCPRKAAKQMWNDPWICLLV

SEQ ID NO: 2641 - protein, 231 aa, Homo sapiens
MEMLPLHRYSHCTDTPTAQRGAHHMGMLPLHRYSHCTDTPTAQRGTHDMGMLPLHRCSHGTERHPSYGDVPTAQILPLHRYSHRTERHPSYGDAPTAQMLPRHREAPIIWGCSHCTDTPIAQILPPHREAPIIWGCSHCTDAPTAQRGTHHMGMIPLHRYSHCTDAPTTQRGAHHMGMLPLHRYSHCTDAPTAQRGTHDMGMLPLHRCSHHTERRPSYGDDPTAQMLPLHR

SEQ ID NO: 2642 - protein, 154 aa, Homo sapiens
MSSDFQGTGALSGMAKEDTSIQLGATPGSQTLHCLVPRSSSRSEVDCSLIHSPSLRAGRWDWQHSKDIAPWGPPCCIFQLRQVYSPPASVRRGPEQQAWQHPLLLPEEVLSSPGCGHTVRLYRPVWSSCRGYDLDKTEQTQEALQCRAYSSSSW

SEQ ID NO: 2643 - protein, 347 aa, Homo sapiens
MVSHPSLSMCLSHYLSPSLTGCVSPYPLLNSSLCHLSSYTLLHSPPPGLPDSVPHTSPPPYNAPQPPAEPPAPPPQAAPSSHHHHHHHYHQSGTATLPRLGAGGLASSAATAQRGPSSSATLPRPPHHAPPGPAAGAPPPGCATLPRMPPDPYLQETRFEGPLPPPPPAAAAPPPPAPAQTAQAPGFVVPTHAGTVGTLPLGGYVAPGYPLQLQPCTAYVPVYPVGTPYAGGTPGGTGVTSTLPPPPQGPGLALLEPRRPPHDYMPIAVLTTICCFWPTGIIAIFKAVQVRTALARGDMVSAEIASREARNFSFISLAVGIAAMVLCTILTVVIIIAAQHHENYWDP

SEQ ID NO: 2644 - protein, 146 aa, Homo sapiens
MRPPLSLSSAGSATHLPTCLILPGEELIYLDPHTTQPAVEPTDGCFIPDESFHCQHPPCRMSIAELDPSIAVGFFCKTEDDFNDWCQQVKKLSLLGGALPMFELVELQPSHLACPDVLNLSLDSSDVERLERFFDSEDEDFEILSL

SEQ ID NO: 2645 - protein, 198 aa, Homo sapiens [sequence omitted]

SEQ ID NO: 2646 - protein, 492 aa, Homo sapiens [sequence omitted]

SEQ ID NO: 2647 - protein, 103 aa, Homo sapiens [sequence omitted]

SEQ ID NO: 2648 - protein, 100 aa, Homo sapiens [sequence omitted]

SEQ ID NO: 2649 - protein, 237 aa, Homo sapiens [sequence omitted]

SEQ ID NO: 2650 - protein, 143 aa, Homo sapiens
MKRMNQNFPHGGAMDTHFANMRSLIQILDSELFELMHQNGDYTHFYFCYRWFLLDFKRELVYDDVFLVWETIWAAKHVSSAHYVLFIALALVEVYRDIILENNMDFTDIIKFFNEMAERHNTKQVLKLARDLVYKVQTLIENK

SEQ ID NO: 2651 - protein, 170 aa, Homo sapiens
METHKELKPLLSPSSETTVTVELPEADRAGAGTGAQAGQLMGFFKGIDQDIERAVQSEIFLHESYCMDTSHQPLLPAPPKTPMDGADCGIQWWNAVFIMLLIGIVLPVFYLVYFKIQASGETPNSLNTTVIPNGSMAMGTVPGQAPRLAVAVPAVTSADSQFSQTTQAGS

SEQ ID NO: 2652 - protein, 141 aa, Homo sapiens [sequence omitted]

SEQ ID NO: 2653 - protein, 342 aa, Homo sapiens
MLGKQQGEEDVRRLFQPFGHIEECTVLRSPDGTSKGCAFVKFGSQGEAQAAIRGLHGSRTMAGASSSLVVKLADTDRERALRRMQQMAGHLGAFHPAPLPLGACGAYTTAILQHQAALLAAAQGPGLGPVAAVAAQMQHVAAFSLVAAPLLPAAAANSPPGSGPGTLPGLPAPIGVNGFGPLTPQTNGQPGSDTLYNNGLSPYPAQSPGVADPLQQAYAGMHHYAAAYPSAYAPVSTAFPQQPSALPQQQREGPEGCNLFIYHLPQEFGDAELIQTFLPFGAVVSAKVFVDRATNQSKCFGFVSFDNPTSAQTAIQAMNGFQIGMKRLKVQLKRPKDANRPY

SEQ ID NO: 2654 - protein, 125 aa, Homo sapiens [sequence omitted]

SEQ ID NO: 2655 - protein, 120 aa, Homo sapiens
MRRQKAEAGLRLIQKVGVGWVRGMWSTKASHPPLTRAPSPQVSPAHWIRKSSVRPEAPGTGFSQFSREGHLQVTETSSTREDLTFESLPGHQRPSQPHGKLPRPDSGIIPPWLRHQPGKT

SEQ ID NO: 2656 - protein, 123 aa, Homo sapiens
MYEIAAPNVAFMTLRSMCNTSKMVTCAKIFFYFLVFFSLSQNVPTIGVIAVVLATHLCDEVSLAGFGYDLNQPRTPLHYFDSQCMAAMNFQTMHNVTTETKFLLKLVKEGVVKDLSGGIDREF

SEQ ID NO: 2657 - protein, 246 aa, Homo sapiens [sequence omitted]

SEQ ID NO: 2658 - protein, 337 aa, Homo sapiens
MEKSWMLWNFVERWLIALASWSWALCRISLLPLIVTFHLYGGIILLLLIFISIAGILYKFQDVLLYFPEQPSSSRLYVPMPTGIPHENIFIRTKDGIRLNLILIRYTGDNSPYSPTIIYFHGNAGNIGHRLPNALLMLVNLKVNLLLVDYRGYGKSEGEASEEGLYLDSEAVLDYVMTRPDLDKTKIFLFGRSLGGAVAIHLASENSHRISAIMVENTFLSIPHMASTLFSFFPMRYLPLWCYKNKFLSYRKISQCRMPSLFISGLSDQLIPPVMMKQLYELSPSRTKRLAIFPDGTHNDTWQCQGYFTALEQFIKEVVKSHSPEEMAKTSSNVTII

SEQ ID NO: 2659 - protein, 148 aa, Homo sapiens
MTPPSTPNPAECGGDLGRRQGLPGRSGCWGWGTGPAGEAGRGRTGDPGSPRYNEPRGREYAIPVPTSEDVGLLAPAAAAFPHIWAGPRSMAWGAEASGSGTNYHSRCRRRRWGVGSRGPWSEQTFSPLGLPPPGAGLTGKDPRGVGCP

SEQ ID NO: 2660 - protein, 176 aa, Homo sapiens [sequence omitted]

SEQ ID NO: 2661 - protein, 144 aa, Homo sapiens; identical to SEQ ID NO: 2511

SEQ ID NO: 2662 - protein, 907 aa, Homo sapiens
MQPKTVFPPLTQIKLQRYPESAEEKVKVEPLDSLSLFHLKTESNGKAFTDKAYNSQVQLTVNANQKAHPLTQPSSPPNQCANVMAGDDQIRFQQVVKEQLMHQRLPTLPGISHETPLPESALTLRNVNVVCSGGITVVSTKSEEEVCSSSFGTSEFSTVDSAQKNFNDYAMNFFTNPTKNLVSITKDSELPTCSCLDRVIQKDKGPYYTHLGAGPSVAAVREIMENRYGQKGNAIRIEIVVYTGKEGKSSHGCPIAKWVLRRSSDEEKVLCLVRQRTGHHCPTAVMVVLIMVWDGIPLPMADRLYTELTENLKSYNGHPTDRRCTLNENRTCTCQGIDPETCGASFSFGCSWSMYFNGCKFGRSPSPRRFRIDPSSPLHEKNLEDNLQSLATRLAPIYKQYAPVAYQNQVEYENVARECRLGSKEGRPFSGVTACLDFCAHPHRDIHNMNNGSTVVCTLTREDNRSLGVIPQDEQLHVLPLYKLSDTDEFGSKEGMEAKIKSGAIEVLAPRRKKRTCFTQPVPRSGKKRAAMMTEVLAHKIRAVEKKPIPRIKRKNNSTTTNNSKPSSLPTLGSNTETVQPEVKSETEPHFILKSSDNTKTYSLMPSAPHPVKEASPGFSWSPKTASATPAPPKNDATASCGFSERSSTPHCTMPSGRLSGANAAAADGPGISQLGEVAPLPTLSAPVMEPLINSEPSTGVTEPLTPHQPNHQPSFLTSPQDLASSPMEEDEQHSEADEPPSDEPLSDDPLSPAEEKLPHIDEYWSDSEHIFLDANIGGVAIAPAHGSVLIECARRELHATTPVEHPNRNHPTRLSLVFYQHKNLNKPQHGFELNKIKFEAKEAKNKKMKASEQKDQAANEGPEQSSEVNELNQIPSHKALTLTHDNVVTVSPYALTHVAGPYNHWV

SEQ ID NO: 2663 - protein, 339 aa, Homo sapiens
MAHALRRILYSTWCPADCQFAFMARNPRSPASKLFCHLFVGSQPGEVQILHLLLCRSFQLAYLLQHPEERAQPEPCPGPTGEVPLKPLSSSGGLVREPFGRDQLSQNVHALVSFRRLPAEGLVGSGKELPESEGRARHARLGNPYCSPTLVRKKAIRSKVIRSGAYRGCTYETQLQLSAREAFPAAWEAWPRGPGGHSCLVESEGSLTENIWAFAGISRPCALALLRRDVLGAFLLWPELGASGQWCLSVRTQCGVVPHQVFRNHLGRYCLEHLPAEFPSLEALVENHAVTERSLFCPLDMGRLNPTYEEQDCGPPGRPPRTLRPLSHAKSEAELQGLG

SEQ ID NO: 2664 - protein, 112 aa, Homo sapiens [sequence omitted]

SEQ ID NO: 2665 - protein, 137 aa, Homo sapiens
MKKVLIGVVVGVFECPLPSLCPMFSLCGQRGTGFGTVLITAGLPFTAGSRLWVGVGVVPLCLLLLPLLALQTYYFRVSGLLHGWQSHAHTRGEEHGWVNESRRYSWDEKWVKSHRTTSSYCRFRLIRKWTWTRLVLS

SEQ ID NO: 2666 - protein, 212 aa, Homo sapiens
MDGWMDGWVGGWGWMDRWMDGWTDGVGEGRKGGRKEGILAPSLRALVGRAETGHSAQPGHPHEGSQVTLVAQIALRTWRDRPESGSPPLPLSSLLFPQAWEQSIPQPCHLPYSSLFHSFPFLAPSALPVFPECLRGERDPHLPKEMSFWGTTSHRSPPHPTTPPTWPLAKSQAELATGKAEPQERHSTIYTLLYILFLLYIHSVHVGVNAVK

SEQ ID NO: 2667 - protein, 1084 aa, Homo sapiens
MVALRGLGSGLQPWCPLDLRLEWVDTVWELDFTETEPLDPSIEAEIIETGLAAFTKLYESLLPFATGEHGSMESIWTFFIENNVSHSTLVALFYHFVQIVHKKNVSVQYREYGLHAAGLYFLLLEVPGSVANQVFHPVMFDKCIQTLKKSWPQESNLNRKRKKEQPKSSQANPGRHRKRGKPPRREDIEMDEIIEEQEDENICFSARDLSQIRNAIFHLLKNFLRLLPKFSLKEKPQCVQNCIEVFVSLTNFEPVLHECHVTQARALNQAKYIPELAYYGLYLLCSPIHGEGDKVISCVFHQMLSVILMLEVGEGSHRAPLAVTSQVINCRNQAVQFISALVDELKESIFPVVRILLQHICAKVVDKSEYRTFAAQSLVQLLSKLPCGEYAMFIAWLYKYSRSSKIPHRVFTLDVVLALLELPEREVDNTLSLEHQKFLKHKFLVQEIMFDRCLDKAPTVRSKALSSFAHCLELTVTSASESILELLINSPTFSVIESHPGTLLRNSSAFSYQRQTSNRSEPSGEINIDSSGETVGSGERCVMAMLRRRIRDEKTNVRKSALQVLVSILKHCDVSGMKEDLWILQDQCRDPAVSVRKQALQSLTELLMAQPRCVQIQKAWLRGVVPVVMDCESTVQEKALEFLDQLLLQNIRHHSHFHSGDDSQVLAWALLTLLTTESQELSRYLNKAFHIWSKKEKFSPTFINNVISHTGTEHSAPAWMLLSKIAGSSPRLDYSRIIQSWEKISSQQNPNSNTLGHILCVIGHIAKHLPKSTRDKVTDAVKCKLNGFQWSLEVISSAVDALQRLCRASAETPAEEQELLTQVCGDVLSTCEHRLSNIVLKENGTGNMDEDLLVKYIFTLGDIAQLCPARVEKRIFLLIQSVLASSADADHSPSSQGSSEAPASQPPPQVRGSVMPSVIRAHAIITLGKLCLQHEDLAEKSIPALVRELEVCEDVAVRNNVIIVMCDLCIRYTIMVDKYIPNISMCLKDSDPFIRKQTLILLTNLLQEEFVKWKGSLFFRFVSTLIDSHPDIASFGEFCLAHLLLKRNPVMFFQHFIECIFHFNNYEKHEKYNKFPQSERALHR

SEQ ID NO: 2668 - protein, 249 aa, Homo sapiens
MRASGHPVTLPTPEGQVHHPESCLISLQTHCHNDIVNLLLDCGADVNKCSDEGLTALSMCFLLHYPAQSFKPNVAERTIPEPQEPPKFPVVPILSSSFMDTNLESLYYEVNVPSQGSYELRPPPAPLLLPRVSGSHEGGHFQDTGQCGGSMDHRSSSLKGDSPLVKGSLGHVESGLEDVLGNTDRGSLCSAETKFESNVCVCDFSIELSQAMLERSAQSHSLLKMASPSPCTSSFDKGTMRRMALSMIE

SEQ ID NO: 2669 - protein, 613 aa, Homo sapiens
MATIPDWKLQLLARRRQEEASVRGREKAERERLSQMPAWKRGLLERRRAKLGLSPGEPSPVLGTVEAGPPDPDESAVLLEAIGPVHQNRFIRQERQQQQQQQQRSEELLAERKPGPLEARERRPSPGEMRDQSPKGRESREERLSPRETRERRLGIGGAQELSLRPLEARDWRQSPGEVGDRSSRLSEAWKWRLSPGETPERSLRLAESREQSPRRKEVESRLSPGESAYQKLGLTEAHKWRPDSRESQEQSLVQLEATEWRLRSGEERQDYSEECGRKEEWPVPGVAPKETAELSETLTREAQGNSSAGVEAAEQRPVEDGERGMKPTEGWKWTLNSGKAREWTPRDIEAQTQKPEPPESAEKLLESPGVEAGEGEAEKEEAGAQGRPLRALQNCCSVPSPLPPEDAGTGGLRQQEEEAVELQPPPPAPLSPPPPAPTAPQPPGDPLMSRLFYGVKAGPGVGAPRRSGHTFTVNPRRSVPPATPATPTSPATVDAAVPGAGKKRYPTAEEILVLGGYLRLSRSCLAKGSPERHHKQLKISFSETALETTYQYPSESSVLEELGPEPEVPSAPNPPAAQPDDEEDEEELLLLQPELQGGLRTKALIVDESCRR

SEQ ID NO: 2670 - protein, 329 aa, Homo sapiens
MLPLEPYLTQTSAVPQMSHFMCHSPTHKPQGLLPWAPFHQASVSLYPISPWPSESVCPPTCPGGASCWFPAGNAWDRVELGFLGFGAGGVSIAVPGFPLSCGQGCCAGGWLGHGARFPAKLRAFPQVIRRGWLTINNISLMKGGSKEYWFVLTAESLSWYKDEEEKEKKYMLPLDNLKIRDVEKGFMSNKHVFAIFNTEQRNVYKDLRQIELACDSQEDVDSWKASFLRAGVYPEKDQVRSRPAQPGPEPPPGRGSRAGFPQDRSFSGHVSQESLKSCSRCPLEQAKEKLGVLCHQGPESSLTEASDRGTQGMGSHLLCSLLFSPSILR

SEQ ID NO: 2671 - protein, 119 aa, Homo sapiens
MVFHYIGQAGLELLTSSDLPALASRNAGVTGMSYHARPQNPGTSAGARGQNRLLYWDCLAGRTDAQGGPMRTQPPGKMVEGKILPTSSDSLSQLHWSIISFLFLKSVSLVSVPGKWTQF

SEQ ID NO: 2672 - protein, 155 aa, Homo sapiens [sequence omitted]

SEQ ID NO: 2673 - protein, 127 aa, Homo sapiens
MAGPSPLWALLSPALPCFSPSYLRGCTLQPPIGSLPPPTVPSITPCPQGGSFPSPGSRACLRLRDSLPLDEGVLGFPSCFLLSWATPSHPGVGEEQGVGAHSFPLLLPELVCTALVCGARMCLSPES

SEQ ID NO: 2674 - protein, 272 aa, Homo sapiens
MHGALFRLHGQAGHRQRRPPALTCLCGLTREGADRVLSAEVKALHEAILGATEQHVGFGGVEADFVYRALVFCEQLVLLVAGWPAQVPRDHHAIGGCCGQQVLIHLVPDHVSTAQVKRRLAPHTQVQLFHELFLLDGIDLEDATACHDHLGCVAAHTDGIGGSIQVAVHGAACQHAATQGCGHTGHLLHGCTGDEVRGQEVSEVGWPGQPGWVISSDLPPRLGPQNCLVPGWSVLVSQSRAVYQPISLTGKLKFTGVCQSSPSPWLSGEGTS

SEQ ID NO: 2675 - protein, 189 aa, Homo sapiens
MDNTCYPCPAPRARKYKCGLPQPCPEEHLAFRVVSGAANVIGPKICLEDKMLMSSVKDNVGRGLNIALVNGVSGELIEARAFDMWAGDVNDLLKFIRPLHEGTLVFVASYDDPATKMNEETRKLFSELGSRNAKELAFRDSWVFVGAKGVQNKSPFEQHVKNSKHSNKYEGWPEALEMEGCIPRRSTAS

SEQ ID NO: 2676 - protein, 140 aa, Homo sapiens [sequence omitted]

SEQ ID NO: 2677 - protein, 131 aa, Homo sapiens
MVRMSRPLFLDWAWRPLCSPSQSLPLTYGPEGWILQWKGTCRQQTALHCPFDFPQAPLRGRHTLSQVPNKGHEKASAVQLPEKQGTDQSRRGPTSAVTKARTSYPESETFIVYLCSYFWNSSKGVYMSGST

SEQ ID NO: 2678 - protein, 167 aa, Homo sapiens [sequence omitted]

SEQ ID NO: 2679 - protein, 137 aa, Homo sapiens [sequence omitted]

SEQ ID NO: 2680 - protein, 266 aa, Homo sapiens
MSTLSGRPLSSLLLGQGDHRSATWLGRGGGAGPGQSGPGHGQGTATSWARTGERGAGPGPACPRCAGEASRGRQRARSGPRRSPRPPRCPAPRLADPASSRSDAPAPPRGRSPRVLLFPQVQAEPLEPWPALPAAPKPLASPEAGMAGPGGRRTTSLLKRRGCGCCWRGEAHSPRTARTGRTRCGRARRTPAPRQVATAEERNSPRVLSSLGFPTTSKSWKTQGRARGAMASPSSSSEATGKPRGRDGSPRMGEEDVPPEEKRLGL

SEQ ID NO: 2681 - protein, 105 aa, Homo sapiens
MQYSVWALIGSRLSQPKRQETAKASLKLRGKLLSPHPSESLLEPPGELCSLDRPAAIGHLPSLGPQHRGAQVTGCLLRAVTGQAIYNSVCAWALQCVHAVGVDGC

SEQ ID NO: 2682 - protein, 190 aa, Homo sapiens
MALRGHPEPQPTNTPLSATVGGPISLFTQPRCHSAARDLVWSQAWPDPDVLEISMQTPGGSSCRKEAVLPRLRVTRPLVPEPAILPVCAARLAGSLATDLSRSHSLLPPWVDLKEPPPPSAPSLLLEDPGQGGCHGAQSCVGTCELANGARGFCPEMGQNESLSEERKGHESKRKSGGRGSPSSHPTQAS

SEQ ID NO: 2683 - protein, 354 aa, Homo sapiens [sequence omitted]

SEQ ID NO: 2684 - protein, 1168 aa, Homo sapiens
MHIVKGKLENVRVMLVPSPRYVGLQNDEPPRLMGEGFVVMQSNDVDIYYYMDEPGLVPEETEENIEGEMSSEDCKLQDLPPCWGLDIVCGKGTDFNYGPWADRQRDCLWKFFFPPDYQVLKVSEIAQPGRPRQILAFELRMNIIADATIDLLFTKNRETNAVHVNVGAGSYLEINIPMTVEENGYTPAIKGQLLHVDATTSMQYRTLLEAEMLAFHINASYPRIWNMPQTWQCELEVYKATYHFIFAQKNFFTDLIQDWSSDSPPDIFSFVPYTWNFKIMFHQFEMIWAANQHNWIDCSTKQQENVYLAACGETLNIDFSLPFTDFVPATCNTKFSLRGEDVDLHLFLPDCHPSKYSLFMLVKNCHPNKMIHDTGIPAECQSGQKTVKPKWRNVTQEKSGWVECWTVPSVMLTIDYTWHPIYPQKADEQLKQSLSEMEETMLSVLRPSQKTSDRVVSSPSTSSRPPIDPSELPPDKLHVEMELSPDSQITLYGPLLNAFLCIKENYFGEDDMYMDFEEVISSPVLSLSTSSSSGWTAVGMENDKKENEGSAKSIHPLALRPWDITVLVNLYKVHGRLPVHGTTDGPECPTAFLERLCFEMKKGFRETMLQPILSPLNVFVSDNYQRPPVDEVLREGHINLSGLQLRAHAMFSAEGLPLGSDSLEYAWLIDVQAGSLTAKVTAPQLACLLEWGQTFVFHVVCREYELERPKSVIICQHGIDRRFCESKLSCIPGPCPTSDDLKYTMIRLAVDGADIYIVEHGCATNIKMGAIRVANCNLHNQSVGEGISAAIQDFQVRQYIEQLNNCRIGLQPAVLRRAYWLEAGSANLGLITVDIALAADHHSKHEAQRHFLETHDARTKRLWFLWPDDILKNKRCRNKCGCLGGCRFFGGTVTGLDFFKLEELTPSSSSAFSSTSAESDMYYGQSLLQPGEWIITKEIPKIIDGNVNGMKRKEWENKSVGIEVERKTQHLSLQVPLRSHSSSSSSEENSSSSAAQPLLAGEKESPSSVADDHLVQKEFLHGTKRDDGQASIPTEISGNSPVSPNTQDKSVGQSPLRSPLKRQASVCSTRLGSTKSLTAAFYGDKQPVTVGVQFSSDVSRSDENVLDSPKQRRSFGSFPYTPSADSNSFHQYRSMDSSMSMADSEAYFSAAEEFEPISSDEGPGTYPG

SEQ ID NO: 2685 - protein, 778 aa, Homo sapiens
MSLTQKGDGESQPQFPAVPLEPLPTTEGTPGLPLQQAEERYESQEPLAGQESPLPLATREAALPILEPVLGQEQPAAPDQPCVLFADAPEPGQALPVEEEAVTLARAETTQARTEAQDLCRASPEPPGPESSSRWLDDLLASPPPSGGGARRGAGAELKDTQSPSTCSEGLLGWSQKDLQSEFGITGDPQPSSFSPSSWCQGASQDYGLGGASPRGDPGLGERDWTSKYGQGAGEGSTREWASRCGIGQEEMEASSSQDQSKVSAPGVLTAQDRVVGKPAQLGTQRSQEADVQDWEFRKRDSQGTYSSRDAELQDQEFGKRDSLGTYSSRDVSLGDWEFGKRDSLGAYASQDANEQGQDLGKRDHHGRYSSQDADEQDWEFQKRDVSLGTYGSRAAEPQEQEFGKSAWIRDYSSGGSSRTLDAQDRSFGTRPLSSGFSPEEAQQQDEEFEKKIPSVEDSLGEGSRDAGRPGERGSGGLFSPSTAHVPDGALGQRDQSSWQNSDASQEVGGHQERQQAGAQGPGSADLEDGEMGKRGWVGEFSLSVGPQREAAFSPGQQDWSRDFCIEASERSYQFGIIGNDRVSGAGFSPSSKMEGGHFVPPGKTTAGSVDWTDQLGLRNLEVSSCVGSGGSSEARESAVGQMGWSGGLSLRDMNLTGCLESGGSEEPGGIGVGEKDWTSDVNVKSKDLAEVGEGGGHSQARESGVGQTDWSGVEAGEFLKSRERLGRHIYALCITLRTPPTPSLPWISSLVVEGFVPSSPPSLSLSASSSSLPWVFF

SEQ ID NO: 2686 - protein, 1430 aa, Homo sapiens
MTSAAEIKKPPVAPKPKFVVANNKPAPPPIAPKPDIVISSVPQSTKKMKPAIAPKPKVLKTSPVREIGQSPSRKIMLNLEGHKQELAESTDNFNCKYEGNQSNDYISPMCSCSSECIHKLGHRENLCVKQLVLEPLEMNENLENSKIDETLTIKTRSKCDLYGEKAKNQGGVVLKASVLEEELKDALIHQMPPFISAQKHRPTDSPEMNGGCNSNGQFRIEFADLSPSPSSFEKVPDHHSCHLQLPSDECEHFETCQDDSEKSNNCFQSSELEALENGKRSTLISSDGVSKKSEVKDLGPLEIHLVPYTPKFPTPKPRKTRTARLLRQKCVDTPSESTEEPGNSDSSSSCLTENSLKINKISVLHQNVLCKQEQVDKMKLGNKSELNMESNSDAQDLVNSQKAMCNETTSFEKMAPSFDKDSNLSSDSTTVDGSSMSLAVDEGTGFIRCTVSMSLPKQLKLTCNEHLQSGRNLGVSAPQMQKESVIKEENSLRIVPKKPQRHSLPATGVLKKAASEELLEKSSYPSSEEKSSEKSLERNHLQHLCAQNRGVSSSFDMPKRASEKPVWKLPHPILPFSGNPEFLKSVTVSSNSEPSTALTKPRAKSLSAMDVEKCTKPCKDSTKKNSFKKLLSMKLSICFMKSDFQKFWSKSSQLGDTTTGHLSSGEQKGIESDWQGLLVGEEKRSKPIKAYSTENYSLESQKKRKKSRGQTSAANGLRAESLDDQMLSRESSSQAPYKSVTSLCAPEYENIRHYEEIPEYENLPFIMAIRKTQELEWQNSSSMEDADANVYEVEEPYEAPDGQLQLGPRHQHSSSGASQEEQNDLGLGDLPSDEEEIINSSDEDDVSSESSKGEPDPLEDKQDEDNGMKSKVHHIAKEIMSSEKVFVDVLKLLHIDFRDAVAHASRQLGKPVIEDRILNQILYYLPQLYELNRDLLKELEERMLHWTEHQRIADIFVKKGPYLKMYSTYIKEFDKNIALLDEQCKKNPGFAAVVREFEMSPRCANLALKHYLLKPVQRIPQYRLLLTDYLKNLIEDAGDYRDTQDALAVVIEVANHANDTMKQGDNFQKLMQIQYSLNGHHEIVQPGRVFLKEGILMKLSRKVMQPRMFFLFNDALLYTTPVQSGMYKLNNMLSLAGMKVRKPTQEAYQNELKIESVERSFILSASSATERDEWLEAISRAIEEYAKKRITFCPSRSLDEADSENKEEVSPLGSKAPIWIPDTRATMCMICTSEFTLTWRRHHCRACGKIVCQACSSNKYGLDYLKNQPARVCEHCFQELQKLDHQHSPRIGSPGNHKSPSSALSSVLHSIPSGRKQKKIPAALKEVSANTEDSSMSGYLYRSKGNKKPWKHFWFVIKNKVLYTYAASEDVAALESQPLLGFTVIQVKDENSESKVFQLLHKNMLFYVFKAEDAHSAQKWIEAFQEGTIL

SEQ ID NO: 2687 - protein, 100 aa, Homo sapiens
MHTSQLELEHLFLSCSRWPGHTVLFPAPSFLFSFQTSLPQMFAIPHLSLQILPILSFHTSPMPLKMPFMFLSLPRDTFLMLELVLGTFTCNGSFFIHKAS

SEQ ID NO: 2688 - protein, 128 aa, Homo sapiens [sequence omitted]

SEQ ID NO: 2689 - protein, 470 aa, Homo sapiens [sequence omitted]

SEQ ID NO: 2690 - protein, 236 aa, Homo sapiens
MPLWTSYTVSKQAEVSSVPDHLTSCVRPDVRVSPSFSQNCLAYKNDKQMSYGFLFPPYLSSSPEAKYDAFLVTNMVPMYPAFKRVWNYFQRVLVKKYASERNGVNVISGPIFDYDYDGLHVTEDKIKQYVEGSSIPVPTHYYSIITSCLDFTQPADKCDGPLSVSSFILPHRPDNEESCNSSEDESKWVEELMKMHTARVRDIEHLTSLDFFRKTSRSYPEILTLKTYLHTYESEI

SEQ ID NO: 2691 - protein, 590 aa, Homo sapiens
MVAVSSVSHAEGNPTFPERKRNLERPTPKYTKVGERLRHVIPGHMACSMACGGRACKYENPARWSEQEQAIKGVYSSWVTDNILAMARPSSELLEKYHIIDQFLSHGIKTIINLQRPGEHASCGNPLEQESGFTYLPEAFMEAGIYFYNLGWKDYGVASLTTILDMVKVMTFALQEGKVAIHCHAGLGRTGVLIACYLVFATRMTADQAIIFVRAKRPNSIQTRGQLLCVREFTQFLTPLRNIFSCCDPKAHAVTLPQYLIRQRHLLHGYEARLLKHVPKIIHLVCKLLLDLAENRPVMMKDVSEGPGLSAEIEKTMSEMVTMQLDKELLRHDSDVSNPPNPTAVAADFDNRGMIFSNEQQFDPLWKRRNVECLQPLTHLKRRLSYSDSDLKRAENLLEQGETPQTVPAQILVGHKPRQQKLISHCYIPQSPEPDLHKEALVRSTLSFWSQSKFGGLEGLKDNGSPIFHGRIIPKEAQQSGAFSADVSGSHSPGEPVSPSFANVHKDPNPAHQQVSHCQCKTHGVGSPGSVRQNSRTPRSPLDCGSSPKAQFLVEHETQDSKDLSEAASHSALQSELSAEARRILAAKAL

SEQ ID NO: 2692 - protein, 113 aa, Homo sapiens
MVICHAPLEVCGPFFFFLFFFSFGGGGTESRSVTQAGVQWHVLGSLQPLPPGFKQFFCLILLSSWDYRCMPPHLANFCIFSRDGVSPYWPDWSRNPDLVICPPRPPKVLGLQV

SEQ ID NO: 2693 - protein, 388 aa, Homo sapiens
MDTKRCFANRFDDYQGSLLAGQCEEAVAPLVTATIERILQELPPLGGGAEARGATAGASACQGGLYGGVAGVAYMLYHVSQSPLFATARERYLRSAKRLIDACARAEEWGEPDADTRAAFLLGGAGVYAVATLVYHALGRSDYVQPLGKFRALCAVCAPVSFLECGSDELFVGRAGYLCAALVLKQKLAQEVLTPAQIKSICQAILDSGKQYAIKKRKPFPLMYSYYGTEYLGAAHGLSSILQMLLSYHEHLKPSDRELVWQSVDFLMEQEQNCNWPPELGETIERENELVHWCHGAPGIAYLFAKAYLVSKKPQYLDTCIRCGELTWQKGLLKKGPGICHGVAGSAYVFLLLYRLTGNSKYIYRAQSSFPVNLIKMEHLLYTRQHCF

SEQ ID NO: 2694 - protein, 240 aa, Homo sapiens
MRIKVQATEQMAYCPIQCEKLCYLPGNSKCSSVYENCLEQSRAIGNVHPRGVQSQRDTSLLKHTCRVDLFDDPCYINTQALQSTPGSAGNQRSAQPLGSPWHCGKAPETVQPGATAQPASSHSLPHIKQQLWSEECYHGKLSRKAAESLLVKDGDFLVRESATSPGQYVLSGLQGGQAKHLLLVDPEGKVRTKDHVFDNVGHLIRYHMDNSLPIISSGSEVSLKQPVRKDNNPALLHSNK

SEQ ID NO: 2695 - protein, 165 aa, Homo sapiens [sequence omitted]

SEQ ID NO: 2696 - protein, 333 aa, Homo sapiens [sequence omitted]

SEQ ID NO: 2697 - protein, 504 aa, Homo sapiens
MSALLIPESEEQGNKENIHQIKQTVPIHAANLHIMHPHPPQEPSADKNNNRRRLRLKSTSRERTETPSGSSSGNNRIEDKASTILTTVSQQGAELLNSGTLGPQSPDQSDEWIFPENADHISYLASSRQSLLLGDDSCNPSHLWLEASKESEHDQQAEESQSVPKDIFTFSSRPRSAPHGKTQTMSPEELSFILDLKEDNSVTSRDTQSEDDFYGGDSSEEGNHSIQGSRGPTTGPSELTQLTLESLLGKAAKRTSKEYLRSAYTEAGATESQDSSMEQIDRNNFEMSLLPTTCLSPTGRRCGSCQKTPEPVIKAKDLSAQQVPASLNKTSLKEISGERLSSIPEASEYDWRNYQPSQMSESELQMLASLRWQQNEELEDAGTSHGLSASQVDNCNVSISTSSDDTTTWNSCLPPPVNQGRHYQKEMNPPSPSNPRDWLNMLSPPIVPPSQQPAEQRPDSCESLSVQGEEDLSVEEDEEVLTLLYDPCLNCYFDPQTGKYYELV

SEQ ID NO: 2698 - protein, 122 aa, Homo sapiens
MLVFTSPQALFGFQHDASNHTIVGLGPNPVPEMKETTLQAPQPPQAPQPLQPRKKRVRRTTQLRRTTGAPDITWGMLKKTTQEAERILLRTQTPFTPENLFLAMLSVVHCNSRKDVKPENKQ

SEQ ID NO: 2699 - protein, 113 aa, Homo sapiens [sequence omitted]

SEQ ID NO: 2700 - protein, 154 aa, Homo sapiens
MAATTLSGLLQCNFLTMDSPMQIHFEQLCKTKLPKKRKRDPGSVGDTIPSAELVKRHAGVLGLGACVLSSPYDVPTWMPQLLMNLSAHLNDPQPIEMTVKKPYPISEGLTMTTGRNINSNSLMTNCLFSPIFLCHHAIMHRKVSQQSSEFTLVW

SEQ ID NO: 2701 - protein, 404 aa, Homo sapiens
MITEALAQGGMHIRARFPPTTAVSAIPSSSIPLGRQPMAQVSQSSLPMLSSPSPGQQVQTPQSMPPPPQPSPQPGQPSSQPNSNVSSGPAPSPSSFLPSPSPQPSQSPVTARTPQNFSVPSPGPLNTPVNPSSVMSPAGSSQAEEQQYLDKLKQLSKYIEPLRRMINKIDKNEDRKKDLSKMKSLLDILTDPSKRCPLKTLQKCEIALEKLKNDMAVPTPPPPPVPPTKQQYLCQPLLDAVLANIRSPVFNHSLYRTFVPAMTAIHGPPITAPVVCTRKRRLEDDERQSIPSVLQGEVARLDPKFLVNLDPSHCSNNGTVHLICKLDDKDLPSVPPLELSVPADYPAQSPLWIDRQWQYDANPFLQSVHRCMTSRLLQLPDKHSVTALLNTWAQSVHQACLSAA

SEQ ID NO: 2702 - protein, 446 aa, Homo sapiens [sequence omitted]

SEQ ID NO: 2703 - protein, 106 aa, Homo sapiens
MQAFPEQQKESRSVARLKCYGVISAHCNLRFLGSGNSHASASRVAGIAGTCHHAQLIFVILVEMGFHHVGQAGLELLTSDNPPASASQSAGITGVSHCAQPKKLAF

SEQ ID NO: 2704 - protein, 105 aa, Homo sapiens
MNHSRNLFFIQISEPPTPEILTYWVLGRTWKSVFIATHPGDSSRWLWCNSSMGWYLGASPGVRAQVPHGQELCRPPLLTSKWFPLVQLEHECYLLSPTLLLLLTI

SEQ ID NO: 2705 - protein, 113 aa, Homo sapiens [sequence omitted]

SEQ ID NO: 2706 - protein, 370 aa, Homo sapiens
MRLEDEAAAQALIGGRDLVVIGFFQDLQDEDVATFLALAQDALDMTFGLTDRPRLFQQFGLTKDTVVLFKKFDEGRADFPVDEELGLDLGDLSRFLVTHSMRLVTEFNSQTSAKIFAARILNHLLLFVNQTLAAHRELLAGFGEAAPRFRGQVLFVVVDVAADNEHVLQYFGLKAEAAPTLRLVNLETTKKYAPVDGGPVTAASITAFCHAVLNGQVKPYLLSQEIPPDWDQRPVKTLVGKNFEQVAFDETKNVFVKFYAPWCTHCKEMAPAWEALAEKYQDHEDIIIAELDATANELDAFAVHGFPTLKYFPAGPGRKVIEYKSTRDLETFSKFLDNGGVLPTEEPPEEPAAPFPEPPANSTMGSKEEL

SEQ ID NO: 2707 - protein, 116 aa, Homo sapiens
MSKNCIKLLCEDPVFAEYIKCILMDERTFLNNNIVYTFMTHFLLKVQSQVFSEANCANLISTLITNLISQYQNLQSDFSNRVEISKASASLNGVRTMQRRRHTLLNCPSVNCVAFI

SEQ ID NO: 2708 - protein, 218 aa, Homo sapiens
MTMYKSKRRHQRYINMAGEPKPYRPKPGNKRPLSALYRLESKEPFLSVGGYVFDYDYYRDDFYNRLFDYHGRVPPPPRAVIPLKRPRVAVTTTRRGKGVFSMKGGSRSTASGSTGSKLKSDELQTIKKELTQIKTKIDSLLGRLEKIEKQQKAEAEAQKKQLEESLVLIQEECVSEIADHSTEEPAEGGPDADGEEMTDGIEEDFDEDGGHELFLQIK

SEQ ID NO: 2709 - protein, 362 aa, Homo sapiens
MPDCPVSLLQWLFQLLTWPPETSLGAFGLLWDLIVDGIFLQPDEDKHLWCPSLQEVREAFHSLGAHSPALYPLGPFWHGGRVLPGEAGLNENEEQDAPQEIALDISLGHIYKFLALCAQAQPGAYTDENLMGLIELLCRTSLDVGLRLLPKVDLQQLLLLLLENIREWPGKLQELCCTLSWVSDHHHNLLALVQFFPDMTSRSRRLRSQLSLVVIARMLGQQEMLPLWQEKTQLSSLSRLLGLMRPSSLRQYLDSVPLPPCQEQQPKASAELDHKACYLCHSLLMLAGVVVSCQDITPDQWGELQLLCMQLDRHISTQIRESPQAMHRTMLKDLATQTYIRWQELLTHCQPQAQYFSPWKDI

SEQ ID NO: 2710 - protein, 131 aa, Homo sapiens
MQGGWFPRKPPNEEIVGNVLQGAASLWSQTRGRSIRPNMAGCVSLRNAGSSARLSAICKMWPKNYLKINHIKTRASMNQLLRIAVAEKGLVSPCFLRPPSSSSHCQGLLSPPSAFSCLALCHLLWRPHVFI

SEQ ID NO: 2711 - protein, 608 aa, Homo sapiens [sequence omitted]

SEQ ID NO: 2712 - protein, 360 aa, Homo sapiens
MALFSVRKARECWRFIRALHKGPAATLAPQKESGERVFSGIQPTGILHLGNYLGAIESWVNLQEEYDTVIYSIVDLHSITVPQDPTVLQQSILDMTAVLLACGINPEKSILFQQSKVSEHTQLSWILTCMVRLPRLQHLHQWKAKAAKQKHDGTVGLLTYPVLQAADILCYKSTHVPVGEDQVQHMELVQDLARSFNQKYGEFFPLPKSILTSMKKVKSLRDPSSKMSKSDPDKLATVRITDSPEEIVQKFRKAVTDFTSEVTYEPDSRAGVSNMVAIHAAVSGLSVEEVVRSSAGLDTARYKLLVADAVIEKFAPIRKEIEKLKMDKDHLRKVLLVGSAKAKELASPVFEEVKKLVGIL

SEQ ID NO: 2713 - protein, 295 aa, Homo sapiens [sequence omitted]

SEQ ID NO: 2714 - protein, 288 aa, Homo sapiens [sequence omitted]

SEQ ID NO: 2715 - protein, 125 aa, Homo sapiens
MQLLKALWALAGAALCCFLVLVIHAQFLKEGQLAAGTCEIVTLDRDSSQPRRTIARQTARCACRKGQIAGTTRARPACVDARIIKTKQWCDMLPCLEGEGCDLLINRSGWTCTQPGGRIKTTTVS

SEQ ID NO: 2716 - protein, 170 aa, Homo sapiens
MSRHSLEEGLDMVNRETAHEREMQTAMQISQSWDESLSLSDSDFDKPEKLYSPKRIDFTPVSPAPSPTRGFGKMFVSSSGLPPSPVPSPRRFSSRRSQSPVKCIRPSVLGPLKRKGEMETESQPKRLFQGTTNMLSPDAAQLSDLSSWWCYQGEEIPALTRCVEHLQMNE

SEQ ID NO: 2717 - protein, 116 aa, Homo sapiens
MLVRFALSLLPNLQPGQQSEVPLWPEASPPCLPSFDLSFPSMKPSGPCHFFTTENSWLLQKPEYLSFPAQMAASLSCPIWATSASCRHPRQMDSVGGNQALRIQCEEVAECLFILF

SEQ ID NO: 2718 - protein, 101 aa, Homo sapiens
MSAAGKAGRADTRQLFPSLGKQHGHGCHRVPRRCSHGRRNAFLQGASWLSSPRSSGRVRSVALVHRRRLPRLKLVMRSWAPGGSSLRNTLETCDISAHTPH

SEQ ID NO: 2719 - protein, 181 aa, Homo sapiens
MMTSLNCARTRVPGAPCDHLGRGLRLVVTQRSDPLPPAALSDPVAKKSCMLNLLSSLPEANLLTFLFLLDHLERMAEKEAVNKMSLHNLGTVFGPTLLRPSEKESKLPANPSQPITMTDSWSLEVMSQIQIPNKMLECNPWTIRVLAAFGLPLSAWLRCSQEWVLKSLENRIRGGLGRGQA

SEQ ID NO: 2720 - protein, 129 aa, Homo sapiens
MAAQPFLKLCEDERVRGGEWSSSQGPVEVTAHPPACFSSAGAGWWSRLQGWALAPLEQARAPEEGLLPDWCWSAFGSAVGSRNIPGPCLGTPGGKQDGRWPVHTFPLILGALIPTSHPLQWGPWPTSQR

SEQ ID NO: 2721 - protein, 142 aa, Homo sapiens [sequence omitted]

SEQ ID NO: 2722 - protein, 258 aa, Homo sapiens [sequence omitted]

SEQ ID NO: 2723 - protein, 143 aa, Homo sapiens
MSFSPYSTMITVCVCFNSRVQLTVPSFTAWLRSRYSKALFMVLRRAAQEKDKGVCQGWHCVKKWACKGRIPGQPLQPQPLGPYLRSLSQHPATQTPRPQARASSRYLELHRSQNRGGSEFKFWFCYCLIACCRDSISSSGKWE

SEQ ID NO: 2724 - protein, 347 aa, Homo sapiens
MPQAELGIQVCTCRLRGSVSRCCSHREFRRQPSPCAAGIGLLHLGSTASRQVKPPRLPPPPWGRSGEKLPFTPFPGCSLSRWHASPQTQVAFGPRWVSLLPLPHTPSGHWDPCPSDVLGSRSGASHCGKRPGAWPERQPRAGLSPESWSRAREAPIPPRPAALSAVSSICSSFHPQLCVPVIPPFSKSPVPIPSVPTHSCSPKKISYRCIYNLWIRGLSIYYYWLIIINYVNLPPVCLLRWVSEETLGEEDALASRFSPPTPVLSGRQWSGATGWAPFSLPPSPCPFCRPLRGAVCLSLSLLPLLRHWLPQSEQPAGGRRSCVGHCLLQCCRRRAEAPPGGFHLTQP

SEQ ID NO: 2725 - protein, 128 aa, Homo sapiens [sequence omitted]

SEQ ID NO: 2726 - protein, 123 aa, Homo sapiens
MLVRPVLNSRPQVVHPLWPPKMLGLQALATTPGLFIYLLMVFFFFFFFFFEMESCSIVQAGVQCHDLGSLQPPPPGFKLFSCLSLPSSWDYRRLQPHLADFCIFSRDGVLPYWSGWSQIPDVR

SEQ ID NO: 2727 - protein, 208 aa, Homo sapiens [sequence omitted]

SEQ ID NO: 2728 - protein, 106 aa, Homo sapiens
MTCNVEHLFICLFSICIYSLMRCLFRSFVHFKIRLFIFLLGFQLFCILDNSSLSDMSFAKFFFPVWGWFSHLFSTFSKRKYINMTVGKIAMRRHRVALISRNITPP

SEQ ID NO: 2729 - protein, 111 aa, Homo sapiens
MPSRPWLLSPVSHGTQEWPFPYLQASVSHPFSEDAGLFFFFLRRSLALSPRLECSGVISAHCKPRLPGSRHSPASASRVAGTTGARHHAWLIFCIFSRDGVSLLARMVSIS

SEQ ID NO: 2730 - protein, 129 aa, Homo sapiens [sequence omitted]

SEQ ID NO: 2731 - protein, 114 aa, Homo sapiens [sequence omitted]

SEQ ID NO: 2732 - protein, 144 aa, Homo sapiens
MFVDPQVFPGKTTRKGQADARDGFPWSWAAPPLWLCRVQSPSWLLSWAGIECLQLFQVHSASYRWIYLSGACDEKGCREDLSHALEAFFLLSWGLTFGYLLLTQISATGLNFSSENGIFLFYHIVRLQIFRTFMLCFPYKTECL

SEQ ID NO: 2733 - protein, 474 aa, Homo sapiens
MDRNPSPPPPPGRDKEEEEEVAGGDCIGSTVYSKHWLFGVLSGLIQIVSPENTKSSSDDEEQLTELDEEMENEICRVWDMSMDEDVALFLQEFNAPDIFMGVLAKSKCPRLREICVGILGNMACFQEICVSISSDKNLGQVLLHCLYDSDPPTLLETSRLLLTCLSQAEVASVWVERIQEHPAIYDSICFIMSSSTNVDLLVKVGEVVDKLFDLDEKLMLEWVRNGAAQPLDQPQEESEEQPVFRLVPCILEAAKQVRSENPEWLDVYMHILQLLTTVDDGIQAIVHCPDTGKDIWNLLFDLVCHEFCQSDDPPIILQEQKTVLASVFSVLSAIYASQTEQEYLKIEKDLPLIDSLIRVLQNMEQCQKKPENSAESNTEETKRTDLTQDDFHLKILKDILCEFLSNIFQALTKETVAQGVKEGQLSKQKCSSAFQNLLPFYSPVVEDFIKILREVDKALADDLEKNFPSLKVQT

SEQ ID NO: 2734 - protein, 104 aa, Homo sapiens
MQKFRKMNETHYYYSFSPWLSSSVTAPSMVAPVTFASIVEEELQQEAALIRSREKPLALIQIEEHAIQDLLVFYEAFGNPEEFVIVERTPQGPLAVPMWNKHGC

SEQ ID NO: 2735 - protein, 110 aa, Homo sapiens
MNGAGFLKHCLEERQQKCLMNPTGLLGCSPLETSNNVCRNPGHVERPHIRVQLRSQLTAGIDIMFTLGEASCHAVRTLGQSYEEARVVRKRGLQPTAIDGVLLCFPVGVQ

SEQ ID NO: 2736 - protein, 151 aa, Homo sapiens
MCTVDVEGFDDVGETLSDAVRDGLGTILRGGAEEGSYDNWPHTRKSWGPLSPGHQRELWTQPDPWTEVLSGHKGDAGACGCCCFCSQFINARCAHPLCLARGLDRRASEEMPILQALCLLPKVSTRSITVPSPQRSAPRASLCPPHKGKSP

SEQ ID NO: 2737 - protein, 156 aa, Homo sapiens
MVPVFTSSALPVKDVEDKPEQQTRTRETDKSPTSTEPRQQPSALFARGNRKAVKSPQRSSSKIKENKHPFALYGWGEKQTDTGSQKTHNVCASAPVHEIHESALRAKNRRQVEKRKLVAQRQRAHSVDVEKNRKMKASSSENPWMTEYMRCYSARA

SEQ ID NO: 2738 - protein, 676 aa, Homo sapiens
MVSNKEMPKEPEDTYAKGEDFTVTSKPAGLSEDQKTAFSIISEGCEILNIHAPAFISSIDQEESEQMQDKLEYLEEKASFKTIPLPDDSETVACHKTLKSRLEDEKVTPLKENKQKETHKTKEEISTDSETDLSFIQPTIPSEEDYFEKYTLIDYNISPDPEKQKAPQKLNVEEKLSKEVTEETISFPVSSVESALEHEYDLVKLDESFYGPEKGHNILSHPETQSQNSADRNVSKDTKRDVDSKSPGMPLFEAEEGVLSRTQIFPTTIKVIDPEFLEEPPALAFLYKDLYEEAVGEKKKEEETASEGDSVNSEASFPSRNSDTDDGTGIYFEKYILKDDILHDTSLTQKDQGQGLEEKRVGKDDSYQPIAAEGEIWGKFGTICREKSLEEQKGVYGEGESVDHVETVGNVAMQKKAPITEDVRVATQKISYAVPFEDTHHVLERADEAGSQGNEVGNASPEVNLNVPVQVSFPEEEFASGATHVQETSLEEPKILVPPEPSEERLRNSPVQDEYEFTESLHNEVVPQDILSEELSSESTPEDVLSQGKESFEHISENEFASEAEQSTPAEQKELGSERKEEDQLSSEVVTEKAQKELKKSQIDTYCYTCKCPISATDKVFGTHKDHEVSTLDTAISAVKVQLAEFLENLQEKSLRIEAFVSEIESFFNTIEENCS

SEQ ID NO: 2739 - protein, 281 aa, Homo sapiens
MRSNSTLNKHNENYKQKKLGEPSCNKLKNILYNGSNIQLSKICLSHSEEFIKKEPLSDTTSQCMKDVQIILDSNITKDTNVDKVQLQNCKWYQENALLDKVTDAEIKKGLLHCTQKKIVPGHSNVPVSSSAAEKEEEVHARLLHCVSKQKILLSQARRTQKHLQMLLAKHVVKHYGQQMKLSMKHQLPKMKTFHEPTTILGNSLPKCTEIKPEVNTLTAENKLWDDAKNGFARCTAAEIQRFAFSATGLLSHVEEGLDSDATDSSSDDDLDEYTLRKNVAV

SEQ ID NO: 2740 - protein, 106 aa, Homo sapiens [sequence omitted]

SEQ ID NO: 2741 - protein, 303 aa, Homo sapiens
MHPHGSPTLHRRKLRLVRGVLSCRTSWPDPRQVSLQSPSSSPPHRPTSCWFQGRSPLCQALISWWYPEPMLSPQEGTAQPPSLSAGQKHLCVTSLLICQGLLWVGTDQGVIVLLPVPRLEGIPKITGKGMVSLNGHCGPVAFLAVATSILAPDILRSDQEEAEGPRAEEDKPDGQAHEPMPDSHVGRELTRKKGILLQYRLRSTAHLPGPLLSMREPAPADGAALEHSEEDGSIYEMADDPDVWVRSRPCARDAHRKEICSVAIISGGQGYRNFGSALGSSGRQAPCGETDSTLLIWQVPLML

SEQ ID NO: 2742 - protein, 129 aa, Homo sapiens [sequence omitted]

SEQ ID NO: 2743 - protein, 200 aa, Homo sapiens
MADEEAEQERLSCGEGGCVAELQRLGERLQELELQLRESRVPAVEAATDYCQQLCQTLLEYAEKWKTSEDPLPLLEVYTVAIQSYVKARPYLTSECENVALVLERLALSCVELLLCLPVELSDKQWEQFQTLVQVAHEKLMENGSCELHFLATLAQETGVWKNPVLCTILSQEPLDKDKGFHPGYHITFSRHVFLGSSWL

SEQ ID NO: 2744 - protein, 111 aa, Homo sapiens [sequence omitted]

SEQ ID NO: 2745 - protein, 131 aa, Homo sapiens [sequence omitted]

SEQ ID NO: 2746 - protein, 148 aa, Homo sapiens
MEILNVTLVPYGNAQEQNVSGRWEFKCQHGEEECKFNKVEACVLDELDMELAFLTIVCMEEFEDMERSLPLCLQLYAPGLSPDTIMECAMGDRGMQLMHANAQRTDALQPPHEYVPWVTVNGVRIFLALSLTLIVPWSQGWTRQRDQR

SEQ ID NO: 2747 - protein, 124 aa, Homo sapiens
MQRAGNPVLTLPGMPFGKTSVPEAEGQCLLLPGAQLLSGPQTHAACPGASPNSFVYFPVGNVLIPLGCKDGTTPEGWTVSRCPANICGISSTQQGKRWRQKPLQAPEGTHFPDPVHLPDPRPPP

SEQ ID NO: 2748 - protein, 193 aa, Homo sapiens
MSLMPKMHLLFPLTLVRSFWSDMMDSAQSFITSSWTFYLQADDGKIVIFQSKPEIQYAPHLEQEPTNLRESSLSKMSSDLQMRNSQAHRNFLEDGESDGFLRCLSLNSGWILTTTLVLSVMVLLWICCATVATAVEQYVPSEKLSIYGDLEFMNEQKLNRYPASSLVVVRSKTEDHEEAGPLPTKVNLAHSEI

SEQ ID NO: 2749 - protein, 132 aa, Homo sapiens
MSVLRPLDKLPGLNTATILLVGTEDALLQQLADSMLKEDCASELKVHLAKSLPLPSSVNRPRIDLIVFVVNLHSKYSLQNTEESLRHVDASFFLGKVCFLATGGKYVPRLLLPTPSQGKAGAAVGFLLRHPG

SEQ ID NO: 2750 - protein, 176 aa, Homo sapiens
MTRRGVCVCVHVCICVLVCSHSIPLCACVLAAWDSAVFWEGGGELSHVLYYIFFEMGSCSVAQAGVQWCDLSSLQLLPPGSSSSPASACQIAGITGVYHHSQLIFVFLVEMGFYHVGQAGLELLASGDPPALASQSAEITGVNYRAWPHVLYFFQVILKSTTRNVGMGFGMYNGNR

SEQ ID NO: 2751 - protein, 169 aa, Homo sapiens [sequence omitted]

SEQ ID NO: 2752 - protein, 270 aa, Homo sapiens
MPTRGEEAVLSRPLLPRPPRRPGLGCGGPKAPALLVISRPEPRQASAPSRKPGRPGATGKKARSRKPGCCGPTNHKSYERGSRRREKSQYRLVPATFGKKKFLTRRGACFALGRVALAGAWVTPIPPWRLTSCRGGPPASSWPRAQGASCPGTADPGIASPGRAGGEGGRGGRGTAGCSPPWGIRGAEPRWRPRGPGSRERTAEWPPELGLLLSPTHLPSDTVSTLQAAGRGGAPNQFAPGLSARLPHGNRTATGTDGVTYLPMQRQKLA

SEQ ID NO: 2753 - protein, 814 aa, Homo sapiens
MAGVGAAALSLLLHLGALALAAGAEGGAVPREPPGQQTTAHSSVLAGNSQEQWHPLREWLGRLEAAVMELREQNKDLQTRVRQLESCECHPASPQCWGLGRAWPEGARWEPDACTACVCQDGAAHCGPQAHLPHCRGCSQNGQTYGNGETFSPDACTTCRCLEGTITCNQKPCPRGPCPEPGACCPHCKPGCDYEGQLYEEGVTFLSSSKPCLQCTCLRSRVRCMALKCPPSPCPEPVLRPGHCCPTCQGCTEGGSHWEHGQEWTTPGDPCRICRCLEGHIQCRQRECASLCPYPARPLPGTCCPVCDGCFLNGREHRSGEPVGSGDPCSHCRCANGSVQCEPLPCPPVPCRHPGKIPGQCCPVCDGCEYQGHQYQSQETFRLQERGLCVRCSCQAGEVSCEEQECPVTPCALPASGRQLCPACELDGEEFAEGVQWEPDGRPCTACVCQDGVPECGAVLCPPAPCQHPTQPPGACCPSCDSCTYHSQVYANGQNFTDADSPCHACHCQDGTVTCSLVDCPPTTCARPQSGPGQCCPRCPDCILEEEVFVDGESFSHPRDPCQECRCQEGHAHCQPRPCPRAPCAHPLPGTCCPNDCSGCAFGGKEYPSGADFPHPSDPCRLCRCLSGNVQCLARRCVPLPCPEPVLLPGECCPQCPAAPAPAGCPRPGAAHARHQEYFSPPGVPCRRCLCLDGSVSCQRLPCPPAPCAHPRQGPCCPSCDGCLYQGKEFASGERFPSPTAACHLCLCWEGSVSCEPKACAPALCPFPARGDCCPDCDGEGHGIGSCRGGMRETRGLGQNNLYCPRVDLKYLLQ

SEQ ID NO: 2754 - protein, 138 aa, Homo sapiens [sequence omitted]

SEQ ID NO: 2755 - protein, 134 aa, Homo sapiens
MPLVLGGVAARPACETSCLCFRPWRLSVSSLSPCSALPLGKPLQPILCLRFCHLCLCLLPVWRWSSLGPPLMIWTRVSILKPPPKPLCLKPLPPTTWGSTVTNSAADEASLGALLATGSWLSRRPGLSLSGSGA

SEQ ID NO: 2756 - protein, 181 aa, Homo sapiens [sequence omitted]

SEQ ID NO: 2757 - protein, 125 aa, Homo sapiens [sequence omitted]

SEQ ID NO: 2758 - protein, 656 aa, Homo sapiens
MSELSDEASEPELLNRSLSMWHGLGTQVSGEELDVPLDLHTAASIGQYEVVKECVQRRELDLNKKNGGGWTPLMYASYIGHDTIVHLLLEAGVSVNVPTPEGQTPLMLASSCGNESIAYFLLQQGAELEMKDIQGWTALFHCTSAGHQHMVRFLLDSGANANVREPICGFTPLMEAAAAGHEIIVQYFLNHGVKVDARDHSGATARMLAKQYGHMKIVALMDTYSPSLPKSLYRSPEKYEDLSSSDESCPAPQRQRPCRKKGVSIHEGPRALARITGIGLGGRAPRPRYEQAPPRGYVTFNSSGENPLEEEGLCCRDVTSPINERDVESSSSSSSREEHAFCANLGPVQSSSSSEGLARAQGLSSEASVESNEDSDHACKSSARKQAKSYMKTKNPDSQWPPRAATDREGFLAESSPQTQRAPYSGPQDLAALLEQIGCLKYLQVFEEQDVDLRIFLTLTESDLKEIGITLFGPKRKMTSAIARWHSSARPPGDALELAYADRLEAEMQELAIQLHKRCEEVEATRGQVCQEQELRAVVESCLLEQDRAREDLQARLRETWALARDAALVLDQLRACQAELSSRVRQDQPPGAATLGLAVPPADSKGWQASLQAMSLPELSGALEDRVREMGQALCLVTQSLEKLQVLNGKKWRET

SEQ ID NO: 2759 - protein, 172 aa, Homo sapiens
MSGKGQVLPWDPRARTELPEAPGATRVGPPSTPAPRKVRHPLPPSQAGILPALHPLPCDVHLPRSRRWRCPTSAAAGGDRRCSSAWRCGAMSKGLEDTELARVRVARPAATPESTLQRGSEPVFRVQGRGGLALSPASGLCPRLRPALSPPPQPQVRAREKGRGERRSGSPD

SEQ ID NO: 2760 - protein, 142 aa, Homo sapiens
MPGPWLCPEFLLRKMTTLSCCLCSVWFSDENSNQSSVSDVYQLKVDSSTNSSPSPQQSESLSPAHTSDFRTDDSQPPTLGQEILEEPSLPSSEVADEPPTLTKEEPVPLETQVVEEEEDSGAPPLKRFCVDQPTVPQTASES

SEQ ID NO: 2761 - protein, 101 aa, Homo sapiens
MNDHQEKLEQADAQKGGEEGHVPDNSCRGLQADGVPERTVIQIIPIPKNKETRGQAISKESQTGNPSRKLGSPLTGSWDWAHEGDRYCSICNFLSIRGARC

SEQ ID NO: 2762 - protein, 180 aa, Homo sapiens
MCLVAFPSRPPEEPTTWTGYFGKVLMASTSYLPSQVTEMFNQGRAFATVRLPFCGHKNICSLATIQKIPRLLVGAADGYLYMYNLDPQEGGECALMKQHRLDGSLETTNEILDSASHDCPLVTQTYGAAAGKGTYVPSSPTRLAYTDDLGAVGGACLEDEASALRLDEDSEHPPMILRTD

SEQ ID NO: 2763 - protein, 208 aa, Homo sapiens
MKQRFSALQLLKLLLLLQPPLPRALREALCPEPCNCVPDGALRCPGPTAGLTRLSLAYLPVKVIPSQAFRGLNEVIKILIQNTKNLRYIEPGAFINLPRLKYLSICNTGIRKFPDVTKVFSSESNFILEICDNLHITTIPGNAFQGMNNESVTLKLYGNGFEEVQSHAFNGTTLTSLELKENVHLEKMHNGAFRGATGPKTLPCRAMA

SEQ ID NO: 2764 - protein, 173 aa, Homo sapiens
MTLCHRDSFGSWHLFHLLLLEYMIHILQSCLEEEEEEEDMGTVKEMLPDDPTLGQPDQALFHSLNSSLSQACASPSMEPLGVMPTHMGQGRYPVGVSNMVLRILGFLVDTAMGNKLIQVLLEDETTESAVKLSLPMGQEALITLKDGQQFVIQISDVPQNSEDIYFRENNANV

SEQ ID NO: 2765 - protein, 322 aa, Homo sapiens
MHLSIHPSLPLCMHLSIHPRLCACICPSIPASVHASVRPSIPASVHASVHSSLPLCMHLSIHPSPPLCMHLSIHPCLCACICPFIPASVHASVHPSIPASVHASVHSSLPLCMHLSIHPSPPLCMHLSIHPCLCVCICPSIHPRLCACIRPSIPASVHASVRPSIPASVHASVRPFIPASVHASVHSSIPDSVHASVHPSILASMLAFVRPSIPASVHASIPASVHASVSLSIPDPFFVMVLSAHNSLILRRSLDPFPPLTPCCSLPSLPGQVLQPVVSTQSSLPPLLSHLSPLHSKFFPNALGLQALKRSLCPWMTKHRPM

SEQ ID NO: 2766 - protein, 151 aa, Homo sapiens
MSSLKVPHTRPVSLSTGSCVIITGTPIIPFVMDPQLQVDFHTEMKEDSDIAFHFRVYFGHWVVMNSRVNGAWQYEVTCHNMPFQDGKPFNLCISVLADEYQPFRIISYVLQHLFCSSSLKTFEFPSLPPPLHLWATPKRNWAISSHSEWEL

SEQ ID NO: 2767 - protein, 129 aa, Homo sapiens [sequence omitted]

SEQ ID NO: 2768 - protein, 119 aa, Homo sapiens [sequence omitted]

SEQ ID NO: 2769 - protein, 111 aa, Homo sapiens [sequence omitted]

SEQ ID NO: 2770 - protein, 142 aa, Homo sapiens
MDRPLHPAPAPCTLRPRSQAQQRPEHGGCPQSTSAFLRTACEQGGGAFRKWKPTLRVRAVHPPRASSLSLFRSTRAQSVTNDTQHLVPREIGGEEGGVLKRSASPWEVNILSEPLAYRGGYTHWMGGHLGSYWHVSQFASPP

SEQ ID NO: 2771 - protein, 409 aa, Homo sapiens
MSLGPCSASCGLGTARRSVACVQLDQGQDVEVDEAACAALVRPEASVPCLIADCTYRWHVGTWMECSVSCGDGIQRRRDTCLGPQAQAPVPADFCQHLPKPVTVRGCWAGPCVGQGTPSLVPHEEAAAPGRTTATPAGASLEWSQARGLLFSPAPQPRRLLPGPQENSVQSSACGRQHLEPTGTIDMRGPGQADCAVAIGRPLGEVVTLRVLESSLNCSAGDMLLLWGRLTWRKMCRKLLDMTFSSKTNTLVVRQRCGRPGGGVLLRYGSQLAPETFYRECDMQLFGPWGEIVSPSLSPATSNAGGCRLFINVAPHARIAIHALATNMGAGTEGANASYILIRDTHSLRTTAFHGQQVLYWESESSQAEMEFSEGFLKAQASLRGQYWTLQSWVPEMQDPQSWKGKEGT

SEQ ID NO: 2772 - protein, 242 aa, Homo sapiens
MKWIPTSNPLPQPFKEPLAIMRVENSKAEKPKPARRKTATDTLIAPLLDRSAHHYKGGGGDPGPGPAPAPAPPPAPDKKHARHFSLDVHPYILGTKKAKAEAVPAALPASRSQEGGFLSQAEDCGLGLAPAPIKDAPLPEKEIPYPTEPARAGLPSGGPFHVRSPPAAPAVAPLTPASLGKAEPLTILSQTPHTRCCTSTRCTRPGRRRTGAPACRRTWGTSSPSLPHSRSSSPPSTSRERS

SEQ ID NO: 2773 - protein, 116 aa, Homo sapiens
MFSVVCHFVSSLRGYFPASLKSSFPACCFWTLFSTVVTSCRLCGPILHQNVTSINSAAMRQIHQWPADSRQQAPMSDGHLHASRGPPPPCGVSRAGLTIPLGTRASGWPESSHTLC

SEQ ID NO: 2774 - protein, 295 aa, Homo sapiens [sequence omitted]

SEQ ID NO: 2775 - protein, 117 aa, Homo sapiens [sequence omitted]

SEQ ID NO: 2776 - protein, 171 aa, Homo sapiens [sequence omitted]

SEQ ID NO: 2777 - protein, 198 aa, Homo sapiens
MALSPNGEILRAREAYYQPSLTAEYDEDSPGGDFDFFSNLVTKWEAAARLPGDSTRQVVVRSGVVLGRGGGAMGHMLLPFRLGLGVPIGSGHQFFPWIHIGDLAGILTHALEANHVHGVLNGVAPSSATNAEFAQTLGAALGRRAFIPLPSAVVQAVFGRQRAIMLLEGQKVIPQRTLATGYQYSFPELGAALKEIVA

SEQ ID NO: 2778 - protein, 104 aa, Homo sapiens [sequence omitted]

SEQ ID NO: 2779 - protein, 226 aa, Homo sapiens [sequence omitted]

SEQ ID NO: 2780 - protein, 218 aa, Homo sapiens [sequence omitted]

SEQ ID NO: 2781 - protein, 117 aa, Homo sapiens [sequence omitted]

SEQ ID NO: 2782 - protein, 137 aa, Homo sapiens [sequence omitted]

SEQ ID NO: 2783 - protein, 480 aa, Homo sapiens [sequence omitted]

SEQ ID NO: 2784 - protein, 163 aa, Homo sapiens [sequence omitted]

SEQ ID NO: 2785 - protein, 473 aa, Homo sapiens [sequence omitted]

SEQ ID NO: 2786 - protein, 102 aa, Homo sapiens [sequence omitted]

SEQ ID NO: 2787 - protein, 182 aa, Homo sapiens
MFSATVSVMESPCREPVASLVPNLNRSSLASASLPVPPPASFTGVCKPFGDTSALLSWDTSRLIGTSLSRTLFSFGESFSLAFSFICWLSLCLASLSNFVNSSHLRFLSSEAFSLESNIFSSGFVRMVSGLFLSCSLVAFTSVFFPRMTVLSFDRVLSEAPAATLSRRSRYDSRAIVESSPM

SEQ ID NO: 2788 - protein, 489 aa, Homo sapiens
MAAEVLSRRCVLMRLLDFSYEQYQKALRQSAGAVVIILPRAMAAVPQDVVRQFMEIEPEMLAMETAVPVYFAVEDEALLSIYKQTQAASASQGSASAAEVLLRTATANGFQMVTSGVQSKAVSDWLIASVEGRLTGLGGEDLPTIVIVAHYDAFGVAPWLSLGADSNGSGVSVLLELARLFSRLYTYKRTHAAYNLLFFASGGGKFNYQGTKRWLEDNLDHTDSSLLQDNVAFVLCLDTVGRGSSLHLHVSKPPREGTLQHAFLRELETVAAHQFPEVRFSMVHKRINLAEDVLAWEHERFAIRRLPAFTLSHLESHRDGQRSSIMDVRSRVDSKTLTRNTRIIAEALTRVIYNLTEKGTPPDMPVFTEQMQIQQEQLDSVMDWLTNQPRAAQLVDKDSTFLSTLEHHLSRYLKDVKQHHVKADKRDPEFVFYDQLKQVMNAYRVKPAVFDLLLAVGIAAYLGMAYVAVQHFSLLYKTVQRLLVKAKTQ

SEQ ID NO: 2789 - protein, 149 aa, Homo sapiens
MSYLLVSLVWSERPSLAHLPRALGSWCAGCQPGSPALLGDAPGLRGPGWLWSRDSWGRGPASDCPGPQPPPLQGIGVMCSIIGWGVCVCVCVCVYVCMRLAHGKAQANPAPRRWAATLPPKHGDVAAALGPPVGPMGEELPFAGVGSLP

SEQ ID NO: 2790 - protein, 483 aa, Homo sapiens [sequence omitted]

SEQ ID NO: 2791 - protein, 108 aa, Homo sapiens
MAENKYICHELGLYGIIECSYWSYVIWATWKKDEKDPVCLQKGKSNSSCTSGNCNPLELIITNPQDPHWKTGENVNLGIDGTGLDPRVNLLIQGEIHKRSPKPVFQTF

SEQ ID NO: 2792 - protein, 319 aa, Homo sapiens [sequence omitted]

SEQ ID NO: 2793 - protein, 102 aa, Homo sapiens [sequence omitted]

SEQ ID NO: 2794 - protein, 108 aa, Homo sapiens
MTELCNGRRAMCSGDQFTVLCRDRKKPFIRAAGWEPGRRKDHDPLPGTWPFCTPQSPSRCHNEKAHILGTALEAFHHWLHSPLQTHCLAPTLFRPPHSMLSTASTPAT

SEQ ID NO: 2795 - protein, 112 aa, Homo sapiens [sequence omitted]

SEQ ID NO: 2796 - protein, 226 aa, Homo sapiens
MQSSLKLVDCIIEVHDARIPLSGRNPLFQETLGLKPHLLVLNKMDLADLTEQQKIMQHLEGEGLKNVIFTNCVKDENVKQIIPMVTELIGRSHRYHRKENLEYCIMVIGVPNVGKSSLINSLRRQHLRKGKATRVGGEPGITRAVMSKIQVESSGARPSTLSRALQASGTCRPLCGFRLLTTLPSPPLSVPAEHPRGRHCPCPYSTVVIVFAPNLWGRHAVFPISR

SEQ ID NO: 2797 - protein, 346 aa, Homo sapiens
MCSSQKPASQREDSLTCVAATTFQKVLDECQNQRACHLLVNSRVFGPDLCPGSSKYLLVSFKCQPNELKNKTVCEDQELKLHCHESKFLNIYSATYGRRTQERDICSSKAERLPPFDCLSYSALQVLSRRCYGKQRCKIIVNNHHFGSPCLPGVKKYLTVTYACVPKNILTAIDPAIANLKPSLKQKDGEYGINFDPSGSKVLRKDGILVSNSLAAFAYIRAHPERAALLFVSSVCIGLALTLCALVIRESCAKDFRDLQLGREQLVPGSDKVEEDSEDEEEEEDPSESDFPGELSGFCRTSYPIYSSIEAAELAERIERREQIIQEIWMNSGLDTSLPRNMGQFY

SEQ ID NO: 2798 - protein, 152 aa, Homo sapiens [sequence omitted]

SEQ ID NO: 2799 - protein, 105 aa, Homo sapiens
MGHSRVTLNLQDRRRPSSGLLSHKGPPFKAEEPPRSKEGAFGGSISCLSQILAPPQGCSQGCVQEAKDPRPSAQLLPTRTTCLSRGSHLLHRFRNRLHVHGAGPR

SEQ ID NO: 2800 - protein, 101 aa, Homo sapiens
MGTRRSKAEEGGGDMRPLQSLSGIRDLRACSPGYSTLSAEDNVSLGQPPLGLGNTTLRPQCPLFLSPSWVGGGLFKDIPTGFGAKPFLQREKRVSRRSVRR

SEQ ID NO: 2801 - protein, 165 aa, Homo sapiens
MRVAALISGGKDSCYNMMQCIAAGHQIVALANLRPAENQVGSDELDSYMYQTVGHHAIDLYAEAMALPLYRRTIRGRSLDTRQVYTKCEGDEVEDLYELLKLVKGITRMTLLAEYDALNLQDFHMHLKVGSQAIVYRTPNELCTHSKFDKHTFPPFISEIAKCEV

SEQ ID NO: 2802 - protein, 188 aa, Homo sapiens [sequence omitted]

SEQ ID NO: 2803 - protein, 176 aa, Homo sapiens [sequence omitted]

SEQ ID NO: 2804 - protein, 272 aa, Homo sapiens [sequence omitted]

SEQ ID NO: 2805 - protein, 193 aa, Homo sapiens
MPRCAKAKSQPHFPVLAQYILNESEARVKAELWMRENAEYLREQREKEARIAKEKELGIYKEHKPKKSCKRREPIQASTAREAIEKMLEQKKISSKINYSVLRGLSSAGGGSPHREDAQPEHSASARKLSRRRTPASRSGADPVTSVGKRLRPLVSTQPAKKVATGEVCCPTQPGQGDLGRQPTSSWAQMLGL

SEQ ID NO: 2806 - protein, 150 aa, Homo sapiens
MSAMGSVRPVAGQHSHLRAGAPVLPRPWACFANTSMAGASPGNWLQLSVTHGRQCRAGRRGDQRLSLTLPHGVSTAAASLGPQLLEYEFSFLPGWSSPQHWNPHPHPLSCPLKGLEFPALVCLWVAPQAPVGRFSSCHTFGTSSSVNSLH

SEQ ID NO: 2807 - protein, 572 aa, Homo sapiens [sequence omitted]

SEQ ID NO: 2808 - protein, 357 aa, Homo sapiens
MDSVEKTTNRSEQKSRKFLKSLIRKQPQELLLVIGTGVSAAVAPGIPALCSWRSCIEAVIEAAEQLEVLHPGDVAEFRRKVTKDRDLLVVAHDLIRKMSPRTGDAKPSFFQDCLMEVFDDLEQHIRSPLVLQSILSLMDRGAMVLTTNYDNLLEAFGRRQNKPMESLDLKDKTKVLEWARGHMKYGVLHIHGLYTDPCGVVLDPSGYKDVTQDAEVMEVLQNLYRTKSFLFVGCGETLHDQIFQALFLYSVPNKVDLEHYMLVLKENEDHFFKHQADMLLHGIKVVSYGDCFDHFPGYVQDLATQICKQQSPDADRVDSTTLLGNACQDCAKRKLEENGIEVSKKRTQSDTDDAGGS

SEQ ID NO: 2809 - protein, 501 aa, Homo sapiens
MQEHKLKVARLDNIFLTRMHWSNVGGLSGMILTLKETGLPKCVLSGPPQLEKYLEAIKIFSGPLKGIELAVRPHSAPEYEDETMTVYQIPIHSEQRRGKHQPWQSPERPLSRLSPERSSDSESNENEPHLPHGVSQRRGVRDSSLVVAFICKLHLKRGNFLVLKAKEMGLPVGTAAIAPIIAAVKDGKSITHEGREILAEELCTPPDPGAAFVVVECPDESFIQPICENATFQRYQGKADAPVALVVHMAPASVLVDSRYQQWMERFGPDTQHLVLNENCASVHNLRSHKIQTQLNLIHPDIFPLLTSFRCKKEGPTLSVPMVQGECLLKYQLRPRREWQRDAIITCNPEEFIVEALQLPNFQQSVQEYRRSAQDGPAPAEKRSQYPEIIFLGTGSAIPMKIRNVSATLVNISPDTSLLLDCGEGTFGQLCRHYGDQVDRVLGTLAAVFVSHLHADHHTVSVGLDHKAGAWRRHCHVELALWLRLFLRFQTCPELLLLISG

SEQ ID NO: 2810 - protein, 233 aa, Homo sapiens
MTPRSRGPEVEVKRAEPRDSKSQAPGQPGASQWGSRVVPNAANGWAGQPPPTWQQGYGPQGMWVPAGQAIGGYGPPPAGRGAPPPPPPFTSYIVSTPPGGFPPPQGFPQGYGAPPQFSFGYGPPPPPPDQFAPPGVPPPPATPGAAPLAFPPPPSQAAPDMSKPPTAQPDFPYGQYGYGQDLSGFGQGVSDPSQQPPSYGGPSVPGSGGPPAGGSGFGRGQNHNVQGFHPYRR

SEQ ID NO: 2811 - protein, 443 aa, Homo sapiens
MIAGAKEKMRSDLLLEGFNNYTFLSNGFVPIPAAQDDEMFQETVEAMAIMGFSEEEQLSILKVVSSVLQLGNIVFKKERNTDQASMPDNTAAQKVCHLMGINVTDFTRSILTPRIKVGRDVVQKAQTKEQADFAVEALAKATYERLFRWILTRVNKALDKTHRQGASFLGILDIAGFEIFEVNSFEQLCINYTNEKLQQLFNHTMFILEQEEYQREGIEWNFIDFGLDLQPCIELIERPNNPPGVLALLDEECWFPKATDKSFVEKLCTEQGSHPKFQKPKQLKDKTEFSIIHYAGKVDYNASAWLTKNMDPLNDNVTSLLNASSDKFVADLWKDVDRIVGLDQMAKMTESSLPSASKTKKGMFRTVGQLYKEQLGKLMTTLRNTTPNFVRCIIPNHEKRVRPAAQTLGLPEARAVPSGHSVPRAPSAPTYPEDPIFHVGKAI

SEQ ID NO: 2812 - protein, 134 aa, Homo sapiens [sequence omitted]

SEQ ID NO: 2813 - protein, 1253 aa, Homo sapiens
MIKEARRTAEQASKPKVPPKSEKENDPLRTPEALPEEKKIEYRLLKEEIANREKQRLIKSDQLKTSSSSPANSDVEIDGIGRIAMVTKQVTDAESKLKKHRILLMKDESVLKNLVQQEAKKKESVRNAEAKITKLTEQLQATEKILNVNRMFLKKLQEQIHRVQQRVTIKKALTLKYGEELARAKAVASKEIGKRKLEQDRFGPNKMMRLDSSPVSSPRKHSAELIAMEKRRLQKLEYEYALKIQKLKEARALKAKEQQNISPVVEEEPEFSLPQPSLHDLTQDKLTLDTEENDVDDEILSGSSRERRRSFLESNYFTKPNLKHTDTANKECINKLNKNTVEKPELFLGLKIGELQKLYSKADSLKQLILKTTTGITEKVLHGQEISVDVDFVTAQSKTMEVKPCPFRPYHSPLLVFKSYRFSPYYRTKEKLPLSSVSYSNMIEPDQCFCRFDLTGTCNDDDCQWQHIQDYTLSRKQLFQDILSYNLSLIGCAETSTNEEITASAEKYVEKLFGVNKDRMSMDQMAVLLVSNINESKGHTPPFTTYKDKRKWKPKFWRKPISDNSFSSDEEQSTGPIKYAFQPENQINVPALDTVVTPDDVRYFTNETDDIANLEASVLENPSHVQLWLKLAYKYLNQNEGECSESLDSALNVLARALENNKDNPEIWCHYLRLFSKRGTKDEVQEMCETAVEYAPDYQSFWTFLHLESTFEEKDYVCERMLEFLMGAAKQETSNILSFQLLEALLFRVQLHIFTGRCQSALAILQNALKSANDGIVAEYLKTSDRCLAWLAYIHLIEFNILPSKFYDPSNDNPSRIVNTESFVMPWQAVQDVKTNPDMLLAVFEDAVKACTDESLAVEERIEACLPLYTNMIALHQLLERYEAAMELCKSLLESCPINCQLLEALVALYLQTNQHDKARAVWLTAFEKNPQNAEVFYHMCKFFILQNRGDNLLPFLRKFIASFFKPGFEKYNNLDLFRYLLNIPGPIDIPSRLCKGNFDDDMFNHQVPYLWLIYCLCHPLQSSIKETVEAYEAALGVAMRCDIVQKIWMDYLVFANNRAAGSRNKVQEFKFFTDLVNRCLVTVPARYPIPFSSADYWSNYEFHNRVIFFYLSCVPKTQHSKTLERFCSVMPANSGLALRLLQHEWEESNVQILKLQAKMFTYNIPTCLATWKIAIAAEIVLKGQREVHRLYQRALQKLPLCASLWKDQLLFEASEGGKTDNLRKLVSKCQEIGVSLNELLNLNSNKTESKNH

SEQ ID NO: 2814 - protein, 139 aa, Homo sapiens [sequence omitted]

SEQ ID NO: 2815 - protein, 133 aa, Homo sapiens
MGRVVSDGELGFVGRVVSDGELGFVGRVVSDGELGFVGRVVSDGELGFVSRVVSDAELGFVGRVVSDGELEFVGRVVSDAELGFVGRVVSDGELGFVGRVVSDAELGFMGRVVSDGELGFVGRVVGCPTVSLF

SEQ ID NO: 2816 - protein, 127 aa, Homo sapiens
MEGDCLKVVCSSQLSFFLVTSPSIPLGRGRGGVGLIAFNLDSCTIPHGSLLQTFAKNPSPHEQNFSACSLCSSKVLLGNRQFCRHFHCKQNPSEEMVASVQDTNQHGNLHYRMRTVFPLPQVGHRPP

SEQ ID NO: 2817 - protein, 333 aa, Homo sapiens
MTCSVTHIVSFSLPFLNPSHPASTPGHTENEQPSLVWFDRGKFYLTFEGSSRGPSPLTMGAQDTLPVAAAFTETVNAYFKGADPSKCIVKITGEMVLSFPAGITRHFANNPSPAALTFRVINFSRLEHVLPNPQLLCCDNTQNDANTKEFWVNMPNLMTHLKKVSEQKPQATYYNVDMLKYQVSAQGIQSTPLNLAVNWRCEPSSTDLRIDYKYNTDAMTTAVALNNVQFLVPIDGGVTKLQAVLPPAVWNAEQQRILWKIPDISQKSENGGVGSLLARFQLSEGPSKPSPLVVQFTSEGSTLSGCDIELVGAGYRFSLIKKRFAAGKYLADN

SEQ ID NO: 2818 - protein, 296 aa, Homo sapiens
MTGKQIFGNIKEAIYPLALNWWRRRKARTNSEKLYSRWEQDHDLESFGPLGLFYEYLETVTQFGFVTLFVASFPLAPLLALINNIVEIRVDAWKLTTQYRRTVASKAHSIGVWQDILYGMAVLSVATNAFIVAFTSDIIPRLVYYYAYSTNATQPMTGYVNNSLSVFLIADFPNHTAPSEKRDFITCRYRDYRYPPDDENKYFHNMQFWHVLAAKMTFIIVMEHVVFLVKFLLAWMIPDVPKDVVERIKREKLMTIKILHDFELNKLKENLGINSNEFAKHVMIEENKAQLAKSTL

SEQ ID NO: 2819 - protein, 215 aa, Homo sapiens
MDELPAAFVDGSKNGGDKHGANSLKITEKVSGQHVEIQAKYIGTTIVVRQVGRYLTFAVRMPEEVVNAVEDWDSQGLYLCLRGCPLNQQIDFQAFHTNAEGTGARRLAAASPAPTAPETFPYETAVAKCKEKLPVEDLYYQACVFDLLTTGDVNFTLAAYYALEDVKMLHSNKDKLHLYERTRDLPGRAAAGLPLAPRPLLGALVPLLALLPVFC

SEQ ID NO: 2820 - protein, 1520 aa, Homo sapiens
MYGEDPSNAMPVIFGKSSCSEFSKEAYTAVVYHNRSPDFHEEIKVKLPATLTDHHHLLFTFYHVSCQQKQNTPLETPVGYTWIPMLQNGRLKTGQFCLPVSLEKPPQAYSVLSPEVPLPGMKWVDNHKGVFNVEVVAVSSIHTQDPYLDKFFALVNALDERLFPVRIGDMRIMENNLENELKSSISALNSSQLEPVVRFLHLLLDKLILLVIRPPVIAGQIVNLGQASFEAMASIINRLHKNLEGNHDQHGRNSLLASYIHYVFRLPNTYPNSSSPGPGGLGGSVHYATMARSAVRPASLNLNRSRSLSNSNPDISGTPTSPDDEVRSIIGSKAMDRSCNRMSSHTETSSFLQTLTGRLPTKKLFHEELALQWVVCSGSVRESALQQAWFFFELMVKSMVHHLYFNDKLEAPRKSRFPERFMDDIAALVSTIASDIVSRFQKDTEMVERLNTSLAFFLNDLLSVMDRGFVFSLIKSCYKQVSSKLYSLPNPSVLVSLRLDFLRIICSHEHYVTLNLPCSLLTPPASPSPSVSSATSQSSGFSTNVQDQKIANMFELSVPFRQQHYLAGLVLTELAVILDPDAEGLFGLHKKVINMVHNLLSSHDSDPRYSDPQIKARVAMLYLPLIGIIMETVPQLYDFTETHNQRGRPICIATDDYESESGSMISQTVAMAIAGTSVPQLTRPGSFLLTSTSGRQHTTFSAESSRSLLICLLWVLKNADETVLQKWFTDLSVLQLNRLLDLLYLCVSCFEYKGKKVFERMNSLTFKKSKDMRAKLEEAILGSIGARQEMVRRSRGQLGTYTIASPPERSPSGSAFGSQGNLRWRKDMTHWRQNTEKLDKSRAEIEHEALIDGNLATEANLIILDTLEIVVQTVSVTESKESILGGVLKVLLHSMACNQSVVYLQHCFATQRALVSKFPELLFEEETEQCADLCLRLLRHCSSSIGTIRSHASASLYLLMRQNFEIGNNFARVKMQVTMSLSSLVGTSQNFNEEFLRRSLKTILTYAEEDLELRETTFLDQVQDLVFNLHMILSDTVKMKEHQEDPEMLIDLMYRIAKGYQTSPDLRLTWLQNMAGKHSERSNHAEAAQCLVHSAALVAEYLSMLEDRKYLPVGCVTFQNISSNVLEESAVSDDVVSPDEEGICSGKYFTESGLVGLLEQAAASFSMAGMYEAVNEVYKVLIPIHEANRDAKKLSTIHGKLQEAFSKIVHQSTGWERMFGTYFRVGFYGTKFGDLDEQEFVYKEPAITKLAEISHRLEGFYGERFGEDVVEVIKDSNPVDKCKLDPNKAYIQITYVEPYFDTYEMKDRITYFDKNYNLRRFMYCTPFTLDGRAHGELHEQFKRKTILTTSHAFPYIKTRVNVTHKEEIILTPIEVAIEDMQKKTQELAFATHQDPADPKMLQMVLQGSVGTTVNQGPLEVAQVFLSEIPSDPKLFRHHNKLRLCFKDFTKRCEDALRKNKSLIGPDQKEYQRELERNYHRLKEALQPLINRKIPQLYKAVLPVTCHRDSFSRMSLRKMDL

SEQ ID NO: 2821 - protein, 112 aa, Homo sapiens [sequence omitted]

SEQ ID NO: 2822 - protein, 446 aa, Homo sapiens
MSFPHFGHPYRGASQFLASASSSTTCCESTQRSVSDVASGSTPAPALCCAPYDSRLLGSARPELGAALGIYGAPYAAAAAAQSYPGYLPYSPEPPSLYGALNPQYEFKEAAGSFTSSLAQPGAYYPYERTLGQYQYERYGAVELSGAGRRKNATRETTSTLKAWLNEHRKNPYPTKGEKIMLAIITKMTLTQVSTWFANARRRLKKENKMTWAPKNKGGEERKAEGGEEDSLGCLTADTKEVTASQEARGLRLSDLEDLEEEEEEEEEAEDEEVVATAGDRLTEFRKGAQSLPGPCAAAREGRLERRECGLAAPRFSFNDPSGSEEADFLSAETGSPRLTMHYPCLEKPRIWSLAHTATASAVEGAPPARPRPRSPECRMIPGQPPASARRLSVPRDSACDESSCIPKAFGNPKFALQGLPLNCAPCPRRSEPVVQCQYPSGAEAG

SEQ ID NO: 2823 - protein, 440 aa, Homo sapiens
MLFGMVTKFCSGHAPHFPMKKVLLLLWKTVLCTLGGFEELQSMKAEKRSILGLPPLPEDSIKVIRNMRAASPPASASDLIEQQQKRGRREHKALIKQDNLDAFNERDPYKADDSREEEEENDDDNSLEGETFLLERDEVMPPPLQHPQTDRLTCPKGLPWAPKVREKDIEMFLESSRSKFIGYTLGSDTNTVVGLPRPIHESIKTLKQHKYTSIAEVQAQMEEEYLRSPLSGGEEEVEQVPAETLYQGLLPSLPQYMIALLKILLAAAPTSKAKTDSINILADVLPEEMPTTVLQSMKLGVDVNRHKEVIVKAISAVLLLLLKHFKLNHVYQVPTGLSLLSCGLGPRALLLLQPTRTGALAFDPLELCMNVLRHGPSAKAFHPWRKEGKVPRAAPFFFFFFSCWLQFEYMAQHLVFANCIPLILKFFNQNIMSYITAKNR

SEQ ID NO: 2824 - protein, 329 aa, Homo sapiens
MQQMTSNFIDQFGFNDEKFADQDDIGNVSFDRVSDINFTLNTNESGNIALFEACCKERIQQFDDGGSDEEDIWEEKHIAFTPESQRRSSSGSTDSEESTDSEEEDGAKQDLFEPSSANTEDKMEVDLSEPPNWSANFDVPMETTHGAPLDSVGSDVWSTEEPMPTKETGWASFSEFTSSLSTKDSLRSNSPVEMETSTEPMDPLTPSAAALAVQPEAAGSVAMEASSDGEEDAESTDKVTETVMNGGMKETLSLTVDAKTETAVFKRVLKSYREEGKLSTSQDAACKDAEECPETAEAKCAAPRPPSSSPEQRTGQPSAPGDTSVNGPV

SEQ ID NO: 2825 - protein, 606 aa, Homo sapiens
MLKTFLFLEKYFPCIKYSSACFPGTGLDVYDIKFAVLLHPQTALHFGPPPSLMAFSSLCCRELLETTCRLANTLKRHGVHRGDRVAIYMPVSPLAVAAMLACARIGAVHTVIFAGFSAESLAGRINDAKCKVVITFNQGLRGGRVVELKKIVDEAVKHCPTVQHVLVAHRTDNKVHMGDLDVPLEQEMAKEDPVCAPESMGSEDMLFMLYTSGSTGMPKGIVHTQAGYLLYAALTHKLVFDHQPGDIFGCVADIGWITGHSYVVYGPLCNGATSVLFESTPVYPNAGRYWETVERLKINQFYGAPTAVRLLLKYGDAWVKKYDRSSLRTLGSVGEPINCEAWEWLHRVVGDSRCTLVDTWWQTETGGICIAPRPSEEGAEILPAMAMRPFFGIVPVLMDEKGSVVEGSNVSGALCISQAWPGMARTIYGDHQRFVDAYFKAYPGYYFTGDGAYRTEGGYYQITGRMDDVINISGHRLGTAEIEDAIADHPAVPESAVIGYPHDIKGEAAFAFIVVKDSAGDSDVVVQELKSMVATKIAKYAVPDEILVVKRLPKTRSGKVMRRLLRKIITSEAQELGDTTTLEDPSIIAEILSVYQKCKDKQAAAK

SEQ ID NO: 2826 - protein, 1088 aa, Homo sapiens [sequence omitted]

SEQ ID NO: 2827 - protein, 1317 aa, Homo sapiens
MEEEKDDSPQLTGIAVGALLALALVGVLILFMFRRLRQFRQAQPTPQYRFRKRDKVMFYGRKIMRKVTTLPNTLVENTALPRQRARKRTKVLSLAKRILRFKKEYPALQPKEPPPSLLEADLTEFDVKNSHLPSEVLYMLKNVRVLGHFEKPLFLELCKHIVFVQLQEGEHVFQPREPDPSICVVQDGRLEVCIQDTDGTEVVVKEVLAGDSVHSLLSILDIITGHAAPYKTVSVRAAIPSTILRLPAAAFHGVFEKYPETLVRVVQIIMVRLQRVTFLALHNYLGLTTELFNAESQAIPLVSVASVAAGKAKKQVFYGEEERLKMPPRLQESCDSDHGGGRPAAAGPLLKRSHSVPAPSIRKQILEELEKPGAGDPDPSAPQGGPGSATSDLGMACDRARVFLHSDEDPGSSVASKSRKSVMVAEIPSTVSQHSESHTDETLASRKSDAIFRAAKKDLLTLMKLEDSSLLDGRVALLHVPAGTVVSRQGDQDASILFVVSGLLHVYQRKIGSQEDTCLFLTRPGEMVGQLAVLTGEPLIFTVKANRDCSFLSISKAHFYEIMRKQPTVVLGVAHTVVKRMSSFVRQIDFALDWVEVEAGRAIYRQGDKSDCTYIMLSGRLRSVIRKDDGKKRLAGEYGRGDLVGVVETLTHQARATTVHAVRDSELAKLPAGALTSIKRRYPQVVTRLIHLLGEKILGSLQQGPVTGHQLGLPTEGSKWDLGNPAVNLSTVAVMPVSEEVPLTAFALELEHALSAIGPTLLLTSDNIKRRLGSAALDSVHEYRLSSWLGQQEDTHRIVLYQADGTLTPWTQRCVRQADCILIVGLGDQEPTVGELERMLESTAVRAQKQLILLHREEGPAPARTVEWLNMRSWCSGHLHLCCPRRVFSRRSLPKLVEMYKHVFQRPPDRHSDFSRLARVLTGNAIALVLGGGGARGCAQVGVLKALAECGIPVDMVGGTSIGAFVGALYSEERNYSQMRIRAKQWAEGMTSLMKAALDLTYPITSMFSGAGFNSSIFSVFKDQQIEDLWIPYFAITTDITASAMRVHTNGSLWRYVRASMSLSGYMPPLCDPKDGHLLMDGGYINNLPADVARSMGAKVVIAIDVGSRDETDLTNYGDALSGWWLLWKRWNPLATKVKVLNMAEIQTRLAYVCCVRQLEVVKSSDYCEYLRPPIDSYSTLDFGKFNEICEVGYQHGRTVFDIWGRSGVLEKMLRDQQGPSKKPASAVLTCPNASFTDLAEIVSRIEPAKPAMVDDESDYQTEYEEELLDVPRDAYADFQSTSAQQGSDLEDESSLRHRHPSLAFPKLSEGSSDQDG

SEQ ID NO: 2828 - protein, 202 aa, Homo sapiens [sequence omitted]

SEQ ID NO: 2829 - protein, 343 aa, Homo sapiens [sequence omitted]

SEQ ID NO: 2830 - protein, 748 aa, Homo sapiens
MKHIEVIVKARQKVKNTEFLQQAALEEYGPELHVALRSRRDELHYLRKLTELLFPYILPPKATDCRSLTLLIREILSGSVFLPSLDFLADPDTVNHLLIIFIDDSPPEKATEPASPLVPFLQKFAEPRNKKPSVLKLELKQIREQQDLLFRFMNFLKQEGAVHVLQFCLTVEEFNDRILRPELSNDEMLSLHEELQKIYKTYCLDESIDKIRFDPFIVEEIQRIAEGPYIDVVKLQTMRCLFEAYEHVLSLLENVFTPMFCHSDEYFRQLLRGAESPTRNSKLNRGSLSLDDFRNTQKRGESFGISRIGSKIKGVFKSTTMEGAMLPNYGVAEGEDDFIEEGIVVMGDDSPVEAVSTPNTPRNLAAWKISIPYVDFFEDPSSERKEKKERIPVFCIDVERNDRRAVGHEPEHWSVYRRYLEFYVLESKLTEFHGAFPDAQLPSKRIIGPKNYEFLKSKREEFQEYLQKLLQHPELSNSQLLADFLSPNGGETQFLDKILPDVNLGKIIKSVPGKLMKEKGQHLEPFIMNFINSCESPKPKPSRPELTILSPTSENNKKLFNDLFKNNANRAENTERKQNQNYFMEVMTVEGVYDYLMYVGRVVFQVPDWLHHLLMGTRILFKNTLEMYTDYYLQCKLEQLFQEHRLVSLITLLRDAIFCENTEPRSLQDKQKGAKQTFEEMMNYIPDLLVKCIGEETKYESIRLLFDGLQQPVLNKQLTYVLLDIVIQELFPELNKVQKEVTSVTSWM

SEQ ID NO: 2831 - protein, 316 aa, Homo sapiens
MAHSVSADGKSPVVLSHVSLSSQGRIACANVLSDLYAMGVTECDNMLMLLGVSNKMTDRERDKVMPLIIQGFKDAAEEAGTSVTGGQTVLNPWIVLGGVATTVCQPNEFIMPDNAVPGDVLVLTKPLGTQVAVAVHQWLDIPEKWNKIKLVVTQEDVELAYQEAMMNMARLNRTAAGLMHTFNAHAATDITGFGILGHAQNLAKQQRNEVSFVIHNLPVLAKMAAVSKACGNMFGLMHGTCPETSGGLLICLSREQAARFCAEIKSPKYGEGHQAWIIGIVEKGNRTARIIDKPRIIEVAPQVATQNVNPTPGATS

SEQ ID NO: 2832 - protein, 651 aa, Homo sapiens
MLDRYEYQMSISIVMNSVEPSHKSTQRPPPPQGRQRERVLKKTGHRLSKTKQKRNRKRNKKQNSQNRIMEENSLEFLSDLTPGDQDPSQSEEEDIEKTRRESEYPFIDGLQNEVGDFVTGYKEKRWKNKDPKDSFQNVMSIVELDNTPKNYLSKEGDNLFVSLLLRPNEISVTCPILTQNLSCVTTDDCSGMKVEKHIRNRHTIALDTQDLSAETSCLFMKKREIVDKNLSHEPILCHQHGIRMSDKVLREEQVYTTKINHWAFFTTNLSDEDLQLGSDRQPYFGSWPAGPHKFICEQRPKKDRACKLAGPDSRGQWIQMIFTSVAASEPGNNPEILTDKLLIGNEDFSPPPETMDSFIETNLFRSCLPQPDIPKNALESTKNKKRRKKRIFNLVPNFDLLGQSRIGVKEREKCDLLTKNHGLKITLGEEKDRISERNSEEENKQKLMTFDHHPLWFYLDIIKATPLNIDGQRYSHCLSFNRLRCSASLYKNYIPSFVLHNLSSIWKPSFTNKKLFLTFESQTRVGNKLNDAGFISPEILHSHPDTSCSLGVTSDFHFLNERFDRKLKRWEEPKELPAEDSQDLTSTDYRSLELPLSQGFAFQLVKLFGSPGVPMESLLPDDYVVPLDWKTLKMIYLQWKMSVEKRQKKIG

SEQ ID NO: 2833 - protein, 122 aa, Homo sapiens
MAAPGPLENQVVLALKAFYNLFPSLLLTATAPSHHSPPPGPCRHVALPCGKACLQPAGHSSTAPSLISFPKNVIYNSTLNPISPPFFHFFLVASFISICQFTSSIHSLSYPFLVAAMCMRGL

SEQ ID NO: 2834 - protein, 501 aa, Homo sapiens
MVFFCPVPLFCPGLAPRDPRPCSFLPPVTFGNGQRPSAVLGGPHGHVGDPAHRAAALQQVWRPEIPRHLQGNPPLLTPPCPQVLLHPMVRDRQGRKMSKSLGNVLDPRDIISGVEMQLLQEKLRSGNLDPAELAIVAAAQKKDFPHGIPECGTDALRFTLCSHGVQAGDLHLSVSEVQSCRHFCNKIWNALRFILNALGEKFVPQPAEELSPSSPMDAWILSRLALAAQECERGFLTRELSLVTHALHHFWLHNLCDVYLEAVKPVLWHSPRPLGPPQVLFSCADLGLRLLAPLMPFLAEELWQRLPPRPGCPPAPSISVAPYPSACSLEHWRQPELERRFSRVQEVVQVLRALRATYQLTKARPRVLLQSSEPGDQGLFEAFLEPLGTLGYCGAVGLLPPGTAAPSGWAQAPLSDTAQVYMELQGLVDPQIQLPLLAARRYKLQKQLDSLTARTPSEGEAGTQRQQKLSSLQLELSKLDKAASHLRQLMDEPPAPGSPEL

SEQ ID NO: 2835 - protein, 304 aa, Homo sapiens
MIFLTIALSFSGASYHKYPNIFSNVQFILKASEIIGKRELRSESIFRPVEDKKRYENTDSDMGGYEINHLLWHCVAAWSCVQNNSPQLNNVLEHLIFHKTQLQKKCWLDSVLALLVLGEAAKLNMACLKALMDVVRDFVSSIMSVQNQEESCKVDGFSWAWNVVYIYTVILAEICLYAATSDLRKTALIGFCHCKSSQKNILYLDKSVPPELKETSILSLLEYFSSKMSENCDQVVWTGYYGLVYNLVKISWELQGDEEQDGLRNMIWQTLQKTKDYEEDVRIQNAINIAQEGKPTRTLDKLFL

SEQ ID NO: 2836 - protein, 259 aa, Homo sapiens
MALRRPPRLRLCARLPDFFLLLLFRGCLIGAVNLKSSNRTPVVQEFESVELSCIITDSQTSDPRIEWKKIQDEQTTYVFFDNKIQVKPVTPVCRVPKAVPVGKMATLHCQESEGHPRPHYSWYRNDVPLPTDSRANPRFRNSSFHLNSETGTLVFTAVHKDDSGQYYCIASNDAGSARCEEQEMEVYDLNIGGIIGGVLVVLAVLALITLGICCAYRRGYFINNKQDGESYKNPGKPDGVNYIRTDEEGDFRHKSSFVI

SEQ ID NO: 2837 - protein, 374 aa, Homo sapiens
MMNGGMSLVAFVLLNECVGTAYWALAGSIGGLFFAVGIAQYALLGYFIRSWRTLAILVNLQGTVVFLLSLFIPESPRWLYSQGRLSEAEEALYLIAKRNRKLKCTFSLTHPANRSCRETGSFLDLFRYRVLLGHTLILMFIWFVCSLVYYGLTLSAGDLGGSIYANLALSGLIEIPSYPLCIYLINQKWFGRKRTLSAFLCLGGLACLIVMFLPEKKDTGVFAVVNSHSLSLLGKLTISAAFNIVYIYTSELYPTVIRNVGLGTCSMFSRVGGIIAPFIPSLKYVQWSLPFIVFGATGLTSGLLSLLLPETLNSPLLETFSDLQVYSYRRLGEEALSLQALDPQQCVDKESSLGSESEEEEEFYDADEETQMIK

SEQ ID NO: 2838 - protein, 383 aa, Homo sapiens
MNAGPSWNKVQHSKNSSGKRQSKSQVPHASSQPRSSLTAVTQPTEEKLKESISPEARRKRNPLGSRCQGASGNKLFLDFQSMKIIKENADEDSASDLSDSERIPIPPSPLTPPDLNLRAEEIDPVYFDLHPGQGHTKPEYYYPNFLPSPFSSWDLRDMALLLNAENKTEAVPRVGGLLGKYIDRLIQLEWLQVQTVQCEKAKGGKARPPTAPGTSGALKSPGRSKLIASALSKPLPHQEGASKSGPSRKKAFHHEEIHPSHYAFETSPRPIDVLGGTRFCSQRQTLEMRTEEKKKKSSKSTKLQRWDLSGSGSSSKVETSGHIRVPKQAAVILDSADSCKASKTQAHAHPRKKGKAESCGHATVSSEKKLKTNGVKQNTYKLK

SEQ ID NO: 2839 - protein, 164 aa, Homo sapiens
MKGCCRPVGRTSAPPRPGPRPSSSGLSCCPCLRGPTTRRTGSCAQPRSPPSFRGPGLDPAEPQMCEQERQSPDARPAGSGREMVPSFCPEGEPCTEGPLRAWHCLPNSPSASLPGWAMRGLDRIALVPSWQWVWVGSWGQGFPECRQLGLHLPRPPTQAQISRA

SEQ ID NO: 2840 - protein, 363 aa, Homo sapiens [sequence omitted]

SEQ ID NO: 2841 - protein, 138 aa, Homo sapiens [sequence omitted]

SEQ ID NO: 2842 - protein, 177 aa, Homo sapiens
MKNLTLERNPMSVSNVVKPLFLSLPFHIMKGLTLERNPMSVSNVEKPSDLPHTFENMVGLTLERNPMNVSNVGKPSDLSKIVEFMKGHTLERNPVNVRNVGKRSIISLLCKYMKGCTEERSSVNVSIVGKHSYLPRSFEYMQEHTMERNPMNVKNAEKHSACLLPFIDMKRHWKETL

SEQ ID NO: 2843 - protein, 127 aa, Homo sapiens
MLEFRAKVLQVFLRRTLTCQWQSHTPGTYLAEECLFRHINIFAYSMLVNKPFHKGSLRTSDFKGKKFIIQTGSRGFTIQRLSCIWLVLWAWSVDHVLIFSIKIRTALGRPRIYSICGSLAESRDPQP

SEQ ID NO: 2844 - protein, 187 aa, Homo sapiens [sequence omitted]

SEQ ID NO: 2845 - protein, 215 aa, Homo sapiens
MRGLRWRYTRLPSQVEDTLSGEEGNEEEEEEEAAPDPAAAPEDPTVPQLTEASQVLSASEIRQLSFHFPPRVTGHPWSLVFCTSRDGFSLQSLYRRMEGCSGPVLLVLRDQDGQIFGAFSSSAIRLSKGFYGTGETFLFSFSPQLKVFKWTGSNSFFVKGDLDSLMMGSGSGRFGLWLDGDLFRGGSSPCPTFNNEVLARQEQFCIQELEAWLLS

SEQ ID NO: 2846 - protein, 477 aa, Homo sapiens [sequence omitted]

SEQ ID NO: 2847 - protein, 235 aa, Homo sapiens
MVYEVPGQDLEVDLYDEDTDRDDFLGSLQICLGDVMTNRVVDEWFVLNDTTSGRLHLRLEWLSLLTDQEVLTEDHGGLSTAILVVFLESACNLPRNPFDYLNGEYRAKKLSRFARNKVSKDPSSYVKLSVGKKTHTSKTCPHNKDPVWSQVFSFFVHNVATERLHLKVLDDDQECALGMLEVPLCQILPYADLTLEQRFQLDHSGLDSLISMRLVLRFLQGRNESWGAHTQDLKP

SEQ ID NO: 2848 - protein, 144 aa, Homo sapiens
MLRAALPALLLPLLGLAAAAVAGKPLRSPSPGPCATAFAPFPTHALRPRAPEGGPQTQHPAGHPALPCTPVPRGSWLRVTSHPPALGEGRWPRIREGSVFLGVHILTADPTPRGGNPQIRPVGRRTEGLGVARRAPFQGNFGLK

SEQ ID NO: 2849 - protein, 629 aa, Homo sapiens
MLRMVSAVLQFGNIALKRERNTDQATMPDNTAAQKLCRLLGLGVTDFSRALLTPRIKVGRDYVQKAQTKEQADFALEALAKATYERLFRWLVLRLNRALDRSPRQGASFLGILDIAGFEIFQLNSFEQLCINYANEKLQQLFNHTMFVLEQEEYQREGIPWTFLDFGLDLQPCIDLIERPANPPGLLALLDEECWFPKATDKSFVEKVAQEQGGHPKFQRPRHLRDQADFSVLHYAGKVDYKANEWLMKNMDPLNDNVAALLHQSTDRLTAEIWKDVEGIVGLEQVSSLGDGPPGGRPRRGMFRTVGQLYKESLSRLMATLSNTNPSFVRCIVPNHEKRAGKLEPRLVLDQLRCNGVLEGIRICRQGFPNRILFQEFRQRYEILTPNAIPKGFMDGKQACEKMIQALELDPNLYRVGQSKIFFRAGVLAQLEEERDLKVTDIIVSFQAAARGYLARRAFQKRQQQQSALRVMQRNCAAYLKLRHWQWWRLFTKVKPLLQVTRQDEVLQARAQELQKVQELQQQSAREVGELQGRVAQLEEERARLAEQLRAEAELCAEAEETRGRLAARKQELELVVSELEARVGEEEECSRQMQTEKKRLQQHIQELEAHLEAEEGARQKLQLEKVTT

SEQ ID NO: 2850 - protein, 102 aa, Homo sapiens [sequence omitted]

SEQ ID NO: 2851 - protein, 494 aa, Homo sapiens [sequence omitted]

SEQ ID NO: 2852 - protein, 167 aa, Homo sapiens
MRTPVVMTLGMVLAPCGLLLNLTGTPVTVQVSYSLVLGYLGSCLLLLGGFSLALSFAPWCDERCRRRRKGPSAGPRRSSVSTIQVEWPEPDLAPAIKYYSDGQHRPPPAQHRKPKPKPKVGFPMPRPRPKAYTNSVDVLDGEGWESQDAPSCSTHPCDSSLPCDSDL

SEQ ID NO: 2853 - protein, 176 aa, Homo sapiens
MWRGIDSIYPYESWSLTLLSRLEFSGRIMAYCSLELLGSNHPPTSAFCCRRIFCLLEPAVSTQEWKFSQKMQHTVKISGDASTKAHRGVKSVITFFLLYAIFSLSFFISVWTSERLEENLIILSQVMGMAYPSCHSCVLILGNKKLRQASLSVLLWLRYMFKDGEPSGHKEFRESS

SEQ ID NO: 2854 - protein, 101 aa, Homo sapiens
MGHEPCGPCDGPSVTLQHGSCPLGLHPSTGTPAMAIRGTARGTCWMSPSQPFPSPPGLTPAPEALPPTWPKAPLSLRLRFPFVFGNPVGSHLASPWHSWGD

SEQ ID NO: 2855 - protein, 110 aa, Homo sapiens [sequence omitted]

SEQ ID NO: 2856 - protein, 183 aa, Homo sapiens
MWSGRDTCPLKNSALDSKTSLAPARAPTGSAEGSHCPLSGYLLPPASQLWRRRMLRRRRRSLPSWSSWGVQCRLGSQHPGACSKPGQVTQDARRRPEGLAGEGGPQEAAQEIRLLLLITCPVLGRMDTHGVSCPSAPVLCSWTATTQRTSLEVQENPSQLRTRIPEQGRITSAFHTPKEGFAE

SEQ ID NO: 2857 - protein, 105 aa, Homo sapiens [sequence omitted]

SEQ ID NO: 2858 - protein, 260 aa, Homo sapiens
MPRQFQDTGFSRPGLGQPRRCDPEPRKSDQQLDCALDLMRRLPPQQIEKNLSDLIDLVPSLCEDLLSSVDQPLKIARDKVVGKDYLLCDYNRDGDSYRSPWSNKYDPPLEDGAMPSARLRKLEVEANNAFDQYRDLYFEGGVSSVYLWDLDHGFAGVILIKKAGDGSKKIKGCWDSIHVVEVQEKSSGRTAHYKLTSTVMLWLQTNKSGSGTMNLGGSLTRQMEKDETVSDCSPHIANIGRLVEVCADFCRQIKTRSSEE

SEQ ID NO: 2859 - protein, 710 aa, Homo sapiens [sequence omitted]

SEQ ID NO: 2860 - protein, 116 aa, Homo sapiens
MTSHGAFTSQVYCGITYTHKAHPFSMHSRRLGKCPEWGTSAPTEAAHILPLCSQAPSRPPTTTCLSSVLQLCVLQNCPVSDSHRMETFVSGFLHFAAGFAGPVWWHQRPALGAAEL

SEQ ID NO: 2861 - protein, 186 aa, Homo sapiens [sequence omitted]

SEQ ID NO: 2862 - protein, 105 aa, Homo sapiens
MYRPVMASCTSVSLWMIALLVFGVLAIFGIAIGLLVHFLAVANRIYFYQGSFKMLDIPYNSNYERETSPENNYLSQILETRWLMHFKVLAFTDNISFLKSSHWCK

SEQ ID NO: 2863 - protein, 557 aa, Homo sapiens [sequence omitted]

SEQ ID NO: 2864 - protein, 740 aa, Homo sapiens [sequence omitted]

SEQ ID NO: 2865 - protein, 221 aa, Homo sapiens [sequence omitted]

SEQ ID NO: 2866 - protein, 477 aa, Homo sapiens
MGARGLGGGSRVMCLTSAPSLCCSFTWSAARTDRNVISVLSGQVVEMFDRQFQELYLMSHSVSLKGIPMEKEPEPEPIVLPSVVPLVPAGTVAKKLVNPKYALVKAKSVDEIAKISSEKQEAKKPLGLKGPALAEHPGELPELLPPIHPGLLHLERANMFEYLPTWVEPDPEPGSDILGYINIIDPNIWNPQPSQMNRIKIRDTSQASAQHQLWKQSQDSRPRPEPCPPPEPSAPQDGVPAENGLPQGDPEPLPPVPKPRTVPVADVLARDSSDIGWVLELPKEEAPQNGTDHRLPRMAGPGHAPLQRQLSVTQDDPESLGVGLPNGLDGVEEEDDDDYVTLSDQDSHSGSSGRGPGPRRPSVASSVSEEYFEVREHSVPLRRRHSEQVANGPTPPPRRQLSAPHITRGTFVGPQGGSPWAQSRGREEADALKRMQAQRSTDKEAQVGQGPCTPGVTSPSLPATQELELLSSGLPCP

SEQ ID NO: 2867 - protein, 216 aa, Homo sapiens
MTASRAWDMGGRSARRNSSRSSVPLPLRSHFLHTPSASAWSSTSPSLARPCRNSSASRDLLPSRSSWRKNLARPWMPEAPRDRHCARSFSMVASTASMLGLGSGQLACVCPRVLPAGPCVSCVVPGETVASGRCLWRWGGAQLHECTVLGSGEWGRDGCAQPDCLLNCQPHRAWDRARSLWHCIPSWLQGGGAGHCPAGAEMPWMETSPWLGRLDA

SEQ ID NO: 2868 - protein, 842 aa, Homo sapiens [sequence omitted]

SEQ ID NO: 2869 - protein, 236 aa, Homo sapiens
MLPDCLSAEGELRCRRLLAGATARLRARPASAAVLVPLCSVRGVPALLYTLRSSRLTGRHKGDVSFPGGKCDPADQDVVHTALRETREELGLAVPEEHVWGLLRPVYDPQKATVVPVLAGVGPLDPQSLRPNSEEVDEVFALPLAHLLQTQNQGYTHFCRGGHFRYTLPVFLHGPHRVWGLTAVITEFALQLLAPGTYQPRLAGLTCSGAEGLARPKQPLASPCQASSTPGLNKGL

SEQ ID NO: 2870 - protein, 715 aa, Homo sapiens
MEENSKKDHRALLNQGEEDELEVFGYRDHNVRKAFCLVASVLTCGGLLLVFYWRPQWRVWANCIPCPLQEADTVLLRTTDEFQRYMRKKVFCLYLYTLKFPVSKKWEESLVADRHSVINQALIKPELKLRCMEVQKIRYVWNDLEKRFQKVGLLEDSNSCSDIHQTFGLGLTSEEQEVRRLVCGPNAIEVEIQPIWKLLVKQVLNPFYVFQAFTLTLWLSQGYIEYSVAIIILTVISIVLSVYDLRQQSVKLHNLVEDHNKVQVTIIVKDKGLEELESRLLVPGDILILPGKFSLPCDAVLIDGSCVVNEGMLTGESIPVTKTPLPQMENTMPWKCHSLEDYRKHVLFCGTEVIQVEPSGQGPVRAVVLQTGYNTAKGDLVRSILYPRPLNFKLYSDAFKFIVFLACLGVMGFFYALGVYMYHGVPPKDTVTMALILLTVTVPPVLPAALTIGNVYAQKRLKKKKIFCISPQRINMCGQINLVCFDKTGTLTEDGLDLWGTVPTADNCFQEAHSFASGQAVPWSPLCAAMASCHSLILLNGTIQGDPLDLKMFEGTAWKMEDCIVDSCKFGTSVSNIIKPGPKASKSPVEAIITLCQFPFSSSLQRMSVIAQLAGENHFHVYMKGAPEMVARFCRSETVPKNFPQELRSYTVQGFRVIALAHKTLKMGNLSEVEHLAREKVESELTFLGLLYVKQQPWYCEVYQYSECFLANQSP

SEQ ID NO: 2871 - protein, 681 aa, Homo sapiens
MESMLNKLKSTVTKVTADVTSAVMGNPVTREFDVGRHIASGGNGLAWKIFNGTKKSTKQEVAVFVFDKKLIDKYQKFEKDQIIDSLKRGVQQLTRLRHPRLLTVQHPLEESRDCLAFCTEPVFASLANVLGNWENLPSPISPDIKDYKLYDVETKYGLLQVSEGLSFLHSSVKMVHGNITPENIILNKSGAWKIMGFDFCVSSTNPSEQEPKFPCKEWDPNLPSLCLPNPEYLAPEYILSVSCETASDMYSLGTVMYAVFNKGKPIFEVNKQDIYKSFSRQLDQLSRLGSSSLTNIPEEVREHVKLLLNVTPTVRPDADQMTKIPFFDDVGAVTLQYFDTLFQRDNLQKSQFFKGLPKVLPKLPKRVIVQRILPCLTSEFVNPDMVPFVLPNVLLIAEECTKEEYVKLILPELGPVFKQQEPIQILLIFLQKMDLLLTKTPPDEIKNSVLPMVYRALEAPSIQIQELCLNIIPTFANLIDYPSMKNALIPRIKNACLQTSSLAVRVNSLVCLGKILEYLDKWFVLDDILPFLQQIPSKEPAVLMGILGIYKCTFTHKKLGITKEQLAGKVLPHLIPLSIENNLNLNQLNSFISVIKEMLNRLESEHKTKLEQLHIMQEQQKSLDIGNQMNVSEEMKVTNIGNQQIDKVFNNIGADLLTGSESENKEDGLQNKHKRASLTLE

SEQ ID NO: 2872 - protein, 412 aa, Homo sapiens [sequence omitted]

SEQ ID NO: 2873 - protein, 113 aa, Homo sapiens
MALANLSVAMAVMPFISVTDLIGGKWIFGHFFCNVFSVNVMCCTAWILTLYVISIDRYLGIMKPLTYPMRQKGKCMTKMILSVCLLSAFVTLPTIFGRAQNVNDDKVCLARQQ

SEQ ID NO: 2874 - protein, 164 aa, Homo sapiens [sequence omitted]

SEQ ID NO: 2875 - protein, 370 aa, Homo sapiens
MFETEADEKREMALEEGKGPGAEDSPPSKEPSPGQELPPGQDLPPNKDSPSGQEPAPSQEPLSSKDSATSEGSPPGPDAPPSKDVPPCQEPPPAQDLSPCQDLPAGQEPLPHQDPLLTKDLPAIQESPTRDLPPCQDLPPSQVSLPAKALTEDTMSSGDLLAATGDPPAAPRPAFVIPEVRLDSTYSQKAGAEQGCSGDEEDAEEAEEVEEGEEGEEDEDEDTSDDNYGERSEAKRSSMIETGQGAEGGLSLRVQNSLRRRTHSEGSLLQEPRGPCFASDTTLHCSDGEGAASTWGMPSPSTLKKELGRNGGSMHHLSLFFTGHRKMSGADTVGDDDEASRKRKSKNLYVGKIPGFCAPLPPLPQGLSLL

SEQ ID NO: 2876 - protein, 438 aa, Homo sapiens
MMYAPVEFSEAEFSRAEYQRKQQFWDSVRLALFTLAIVAIIGIAIGIVTHFVVEDDKSFYYLASFKVTNIKYKENYGIRSSREFIERSHQIERMMSRIFRHSSVGGRFIKSHVIKLSPDEQGVDILIVLIFRYPSTDSAEQIKKKIEKALYQSLKTKQLSLTLNKPSFRLTPIDSKKMRNLLNSRCGIRMTSSNMPLPASSSTQRIVQGRETAMEGEWPWQASLQLIGSGHQCGASLISNTWLLTAAHCFWKNKDPTQWIATFGATITPPAVKRNVRKIILHENYHRETNENDIALVQLSTGVEFSNIVQRVCLPDSSIKLPPKTSVFVTGFGSIVDDGPIQNTLRQARVETISTDVCNRKDVYDGLITPGMLCAGFMEGKIDACKGDSGGPLVYDNHDIWYIVGIVSWGQSCALPKKPGVYTRVTKYRDWIASKTGM

SEQ ID NO: 2877 - protein, 273 aa, Homo sapiens
MVGEIASASACDHANPQLSNPSPFQTLGLDLVLECVARYQPKQRSMFTFVCGQLFRRKEFSSHFKNVHGDIHAGLNGWMEQRCPLAYYGCTYSQRRFCPSIQGAKIIHDRQLRSFGVQPCVSTVLVEPARNCVLGLHNDHLSSLPFEVLQHIAGFLDGFSLCQLSCVSKLMRDVCGSLLQSRGMVILQWGKRKYPEGNSSWQIKEKVWRFSTAFCSVNEWKFADILSMADHLKKCSYNVVEKREEAIPLPCMCVTRELTKEGRSLRSVLKPVL

SEQ ID NO: 2878 - protein, 136 aa, Homo sapiens
MAGWGLVDVSGAPEPWRIPHGIPLPALSGLCGVRRSPSSRFSFFPPQQRNWRKDIKLSAVDLSAEIFPESMVVLNYLHVSSIFNSGVGLFLISSQKCSALGEGTSPLACHFPGVLYHFDGTLWSAENALSWHASRL

SEQ ID NO: 2879 - protein, 103 aa, Homo sapiens
MVRHSGGGGLVYIYDLLKVFGIFREVCFLFCFLRLMLPRLECNGAVLGSLQPPPPGFRGFSCLSFPGSWDYRCMPPCPANFCIFSRDGISPCWPGWSHTPDLR

SEQ ID NO: 2880 - protein, 207 aa, Homo sapiens
MERHMVRGQLYKHFDLERKNAKQAEARLDQRLQRLKVICLYHVKLLTWEQRQLQKELQRLQQETMKKKFSSYLGNGFQKRPEDVLVFSPQGRQKHRAPQAKKMRALATRMAQDTCKSKSQVPPSHDAGLKDPMKSKKQPLSQNNRTACFIKEQPQAQEKDSVNPSKDVDPSKGISVPCQNQEVSTNTIEQGPSSSPASGLQWGDNTL

SEQ ID NO: 2881 - protein, 108 aa, Homo sapiens
MDVEGGLCGAVLVSWVCPLPPFLLLLSSWTFSAIAVLSFTLHHLDGMAPATKHLPGLRSALPCLASATPTSQLQGMHYFYFKPSASFLLSLQPPPHLHLLKNGRKKKL

SEQ ID NO: 2882 - protein, 100 aa, Homo sapiens
MQSENAISPDLTLVFNEKYILNQMYFLKKRVHSSLSLSLALALALALSTGSLSLSFHGLPLMPSRSWTVLLPSRLTATSLPDSPASACRVPAIAGACRHA

SEQ ID NO: 2883 - protein, 897 aa, Homo sapiens
MEVICYGLTLPLDGETVKYCVDVYTDWIMALVLPKDSIPLPVIKEPNQYVQTILKHLQNLFVPRQEQGSSQIRLCLQVLRAIQKLARESSLMARETWEVLLLFLLQINDILLAPPTVQGGIAENLAEKLIGVLFEVWLLACTRCFPTPPYWKTAKEMVANWRHHPAVVEQWSKVICALTSRLLRFTYGPSFPAFKVPDEDASLIPPEMDNECVAQTWFRFLHMLSNPVDLSNPAIISSTPKFQEQFLNVSGMPQELNQYPCLKHLPQIFFRAMRGISCLVDAFLGISRPRSDSAPPTPVNRLSMPQSAAVSTTPPHNRRHRAVTVNKATMKTSTVSTAHASKVQHQTSSTSPLSSPNQTSSEPRPLPAPRRPKVNSILNLFGSWLFDAAFVHCKLHNGINRDSSMTAITTQASMEFRRKGSQMSTDTMVSNPMFDASEFPDNYEAGRAEACGTLCRIFCSKKTGEEILPAYLSRFYMLLIQGLQINDYVCHPVLASVILNSPPLFCCDLKGIDVVVPYFISALETILPDRELSKFKSYVNPTELRRSSINILLSLLPLPHHFGTVKSEVVLEGKFSNDDSSSYDKPITFLSLKLRLVNILIGALQTETDPNNTQMILGAMLNIVQDSALLEAIGCQMEMGGGENNLKSHSRTNSGISSASGGSTEPTTPDSERPAQALLRDYALNTDSAAGLLIRSIHLVTQRLNSQWRQDMSISLAALELLSGLAKVKVMVDSGDRKRAISSVCTYIVYQCSRPAPLHSRDLHSMIVAAFQCLCVWLTEHPDMLDEKDCLKEVLEIVELGISGSKSKNNEQEVKYKGDKEPNPASMRVKDAAEATLTCIMQLLGAFPSPSGPASPCSLVNETTLIKYSRLPTINKQLEPEFYTSLFQEVGLKNCSS

SEQ ID NO: 2884 - protein, 143 aa, Homo sapiens
MKSRLRRSQMEMRDLLGPGVKVTFVRTLWLETLCPCPRNLWNFELESEDLGYLAEEISKQQSVQDVAWLLLVVCAHICEQRHDKKLELIFKKEAECKSLENLQPGHVVEKKKTIFWRGIQASCRKLQVTRSKMLIAKIVGKTP

SEQ ID NO: 2885 - protein, 131 aa, Homo sapiens
MSKRYLQKATKGKLLIIIFIVTLWGKVVSSANHHKAHHVKTGTCEVVALHRCCNKNKIEERSQTVKCSCFPGQVAGTTRAAPSCVDASIVEQKWWCHMQPCLEGEECKVLPDRKGWSCSSGNKVKTTRVTH

SEQ ID NO: 2886 - protein, 275 aa, Homo sapiens [sequence omitted]

SEQ ID NO: 2887 - protein, 165 aa, Homo sapiens [sequence omitted]

SEQ ID NO: 2888 - protein, 116 aa, Homo sapiens
MGNSLSIRPDSTMGNSTPVPPDSSLGYIIHHWNQFDPDTLKGKCIIFFCNTVWPHYELPSPQQWAVSGSLNYDTILQLDLLCKRLGRWSEVPYVQALVCDVPLPVSMCSHCSPPTY

SEQ ID NO: 2889 - protein, 148 aa, Homo sapiens
MEHMLLANHTDKATFTGTQRQRSCSGASVSQPRPLRGKLVGYWDPHSRLLSRGRALGSVSAPSTPRGRGWKATFDGCILHDDLLTKVHGFQSLIGLQQHLACGDSGSLMKNCHDVRKSLSERGWGAACWGGGGVASREKLHPLAESGT

SEQ ID NO: 2890 - protein, 106 aa, Homo sapiens
MGLGRCWRRVLVLPGKVLPPLVAWIKYHFCKSHYAQAEMAFPSSGLPCCSTCFPLRTCDVTPGLCPSPGKTGNPFRAGGVPVLVLCAVTPAQCLAHTRWLCRCPAA

SEQ ID NO: 2891 - protein, 187 aa, Homo sapiens [sequence omitted]

SEQ ID NO: 2892 - protein, 437 aa, Homo sapiens
MKVDRTKLKKTPTEAPADCRALIDKLKVCNDEQLLLELQQIKTWNIGKCELYHWVDLLDRFDGILADAGQTVENMSWMLVCDRPEREQLKMLLLAVLNFTALLIEYSFSRHLYSSIEHLTTLLASSDMQVVLEVAAGMAAAMPLALLVLLLLGPGGWCLAEPPRDSLREELVITPLPSGDVAATFQFRTRWDSELQREGVSHYRLFPKALGQLISKYSLRELHLSFTQGFWRTRYWGPPFLQAPSGAELWVWFQDTVTDVDKSWKELSNVLSGIFCASLNFIDSTNTVTPTASFKPLGLANDTDHYFLRYAVLPREVVCTENLTPWKKLLPCSSKAGLSVLLKADRLFHTSYHSQAVHIRPVCRNARCTSISWELRQTLSVVFDAFITGQGKKDWSLFRMFSRTLTEPCPLASESRVYVDITTYNQPCLCVPRTTRH

SEQ ID NO: 2893 - protein, 725 aa, Homo sapiens
MPPFLLLEAVCVFLFSRVPPSLPLQEVHVSKETIGKISAASKMMWCSAAVDIMFLLDGSNSVGKGSFERSKHFAITVCDGLDISPERVRVGAFQFSSTPHLEFPLDSFSTQQEVKARIKRMVFKGGRTETELALKYLLHRGLPGGRNASVPQILIIVTDGKSQGDVALPSKQLKERGVTVFAVGVRFPRWEELHALASEPRGQHVLLAEQVEDATNGLFSTLSSSAICSSATPDCRVEAHPCEHRTLEMVREFAGNAPCWRGSRRTLAVLAAHCPFYSWKRVFLTHPATCYRTTCPGPCDSQPCQNGGTCVPEGLDGYQCLCPLAFGGEANCALKLSLECRVDLLFLLDSSAGTTLDGFLRAKVFVKRFVRAVLSEDSRARVGVATYSRELLVAVPVGEYQDVPDLVWSLDGIPFRGGPTLTGSALRQAAERGFGSATRTGQDRPRRVVVLLTESHSEDEVAGPARHARARELLLLGVGSEAVRAELEEITGSPKHVMVYSDPQDLFNQIPELQGKLCSRQRPGCRTQALDLVFMLDTSASVGPENFAQMQSFVRSCALQFEVNPDVTQVGLVVYGSQVQTAFGLDTKPTRAAMLRAISQAPYLGGVGSAGTALLHIYDKVMTVQRGARPGVPKAVVVLTGGRGAEDAAVPAQKLRNNGISVLVVGVGPVLSEGLRRLAGPRDSLIHVAAYADLRYHQDVLIEWLCGGEWGNPHPQGCPHGRPSA

SEQ ID NO: 2894 - protein, 689 aa, Homo sapiens [sequence omitted]

SEQ ID NO: 2895 - protein, 954 aa, Homo sapiens [sequence omitted]

SEQ ID NO: 2896 - protein, 104 aa, Homo sapiens
MPESLNEERWWISFSAKKFAEALGSTEAKALLYQKFEGHANDLYVEGLPENIPFRSPSWYGIPRLENIIQVGNQIKFLIKSNSSRTPLSPSRLSSSSTTPPQKP

SEQ ID NO: 2897 - protein, 754 aa, Homo sapiens [sequence omitted]

SEQ ID NO: 2898 - protein, 108 aa, Homo sapiens [sequence omitted]

SEQ ID NO: 2899 - protein, 107 aa, Homo sapiens [sequence omitted]

SEQ ID NO: 2900 - protein, 640 aa, Homo sapiens
MPKPPKPRNNLEDRYNPGIQGRREHRPGPGRVRAASSPGGSAPRAERRLWGEGWESGAAPHPHSSRVSALRPCGVVGAWVGMGVCQRTRAPWKEKSQLERAALGFRKGGSGMFASGWNQTVPIEEAGSMAALLLLPLLLLLPLLLLKLHLWPQLRWLPADLAFAVRALCCKRALRARALAAAAADPEGPEGGCSLAWRLAELAQQRAAHTFLIHGSRRFSYSEAERESNRAARAFLRALGWDWGPDGGDSGEGSAGEGERAAPGAGDAAAGSGAEFAGGDGAARGGGAAAPLSPGATVALLLPAGPEFLWLWFGLAKAGLRTAFVPTALRRGPLLHCLRSCGARALVLAPEFLESLEPDLPALRAMGLHLWAAGPGTHPAGISDLLAEVSAEVDGPVPGYLSSPQSITDTCLYIFTSGTTGLPKAARISHLKILQCQGFYQLCGVHQEDVIYLALPLYHMSGSLLGIVGCMGIGATVVLKSKFSAGQFWEDCQQHRVTVFQYIGELCRYLVNQPPSKAERGHKVRLAVGSGLRPDTWERFVRRFGPLQVLETYGLTEGNVATINYTGQRGAVGRASWLYKHIFPFSLIRYDVTTGEPIRDPQGHCMATSPGEPGLLVAPVASSPHSWAMLAGQSWPRGSC

SEQ ID NO: 2901 - protein, 437 aa, Homo sapiens
MTTEGFDVRSVGNTLVLHQTALVEAFNLKAAIEYQLRNYEVAQETLTDMPPRAEEELDPVTLHNQALMNMDARPTEGFEKLQFLLQQNPFPPETFGNLLLLYCKYEYFDLAADVLAENAHLTYKFLTPYLYDFLDALITCQTAPEEAFIKLDGLAGMLTEQLRRLTKQVQEARHNRDDEAIKKAVNEYDETMEKYIPVLMAQAKIYWNLENYPMVEKIFRKSVEFCNDHDVWKLNVAHVLFMQENKYKEAIGFYEPIVKKHYDNILNVSAIVLANLCVSYIMTSQNEEAEELMRKIEKEEEQLSYDDPNRKMYHLCIVNLVIGTLYCAKGNYEFGISRVIKSLEPYNKKLGTDTWYYAKRCFLSLLENMSKHMIVIHDSVIQECVQFLGHCELYGTNIPAVIEQPLEEERMHVGKNTVTDESRQLKALIYEIIGWNK

SEQ ID NO: 2902 - protein, 1036 aa, Homo sapiens
MDDPSPCGTSEMCPAALYGFPSTGTSPPRPPANSTGTVQHLRSDSFPGSHRTEQTPDLVGMLLSYSHSELPQRPPKPAIYSSVTPRRDRRSGRDYSTVSASPTALSTLKQDSQESISNLERPSSPPSIQPWVSPHNPAFATESPAYGSSPSFVSMEDVRIHEPLPPPPPQRRDTHPSVVETDGHARVVVPTLKQHSHPPPLALGSGLHAPHKGPLPQASDPAVARQHRPLPSTPDSSHHAQATPRWRYNKPLPPTPDLPQPHLPPISAPGSSRIYRPLPPLPIIDPPTEPPPLPPKSRGRSRSTRGGHMNSGGHAKTRPACQDWTVPLPASAGRTSWPPATARSTESFTSTSRSKSEVSPGMAFSNMTNFLCPSSPTTPWTPELQGPTSKDEAGVSEHPEAPAREPLRRTTPQQGASGPGRSPVGQARQPEKPSHLHLEKASSWPHRRDSGRPPGDSSGQAVAPSEGANKHKGWSRQGLRRPSILPEGSSDSRGPAVEKHPGPSDTVVFREKKPKEVMGGFSRRCSKLINSSQLLYQEYSDVVLNKEIQSQQRLESLSETPGPSSPRQPRKALVSSESYLQRLSMASSGSLWQEIPVVRNSTVLLSMTHEDQKLQEVKFELIVSEASYLRSLNIAVDHFQLSTSLRATLSNQEHQWLFSRLQDVRDVSATFLSDLEENFENNIFSFQVCDVVLNHAPDFRRVYLPYVTNQTYQERTFQSLMNSNSNFREVLEKLESDPVCQRLSLKSFLILPFQRITRLKLLLQNILKRTQPGSSEEAEATKAHHALEQLIRDCNNNVQSMRRTEELIYLSQKIEFECKIFPLISQSRWLVKSGELTALEFSASPGLRRKLNTRPVHLHLFNDCLLLSRPREGSRFLVFDHAPFSSIRGEKCEMKLHGPHKNLFRLFLRQNTQGAQAEFLFRTETQSEKLRWISALAMPREELDLLECYNSPQVQCLRAYKPRENDELALEKADVVMVTQQSSDGWLEGVRLSDGERGWFPVQQVEFISNPEVRAQNLKEAHRVKTAKLQLVEQQA

SEQ ID NO: 2903 - protein, 233 aa, Homo sapiens
MAQLPHHHVPEPAFRKLVEDALGRTSNQLRSFQETFEKVQPPPTTQLLLPGSERQVQALLSRYGPGKLYQVTSNISGTGTLDLTLPRGQIVAILQNKDTKGNSGRWLVDTGGHRGYVPAGKLQLYHVVPSAEELRRQAGLNKDPRCLTPEPSPALVPSIPTVNQVIAAYPFVARSSHEVSLQAGQPVTILEAQDKKGNPEWSLVEVNGQRGYVPSGFLARARSPVLWGWSLPS

SEQ ID NO: 2904 - protein, 229 aa, Homo sapiens
MFSHILANLEQGLAEDGGMSSVTQEGRQASIRLWRSRLGRVMYSMANCLLLMKDYVLAVEAYHSVIKYYPEQEPQLLSGIGRISLQIGDIKTAEKYFQDVEKVTQKLDGLQGKIMVLMNSAFLHLGQNNFAEAHRFFTEILRMDPRNAVANNNAAVCLLYLGKLKDSLRQLEAMVQQDPRHYLHESVLFNLTTMYELESSRSMQKKQALLEAVAGKEGDSFNTQCLKLA

SEQ ID NO: 2905 - protein, 117 aa, Homo sapiens [sequence omitted]

SEQ ID NO: 2906 - protein, 143 aa, Homo sapiens
MCMLRLLPEHQNGNIRVFILESNLTIIMDVVRLFKKSMFKDIESTKMAISDRLDKENVVHIHHGILCSRRKERDHVRCRDMDGAGSHYPQKTNPGTEKQTPHVLTHKWELNTENTWNQGEEQHTLRPATAGGGSGEGEHQENS

SEQ ID NO: 2907 - protein, 1035 aa, Homo sapiens
MVFLQNHVRFFLESLPAFLRVLIQAGALCWSLPELSQGEVGKGACPAEVGKHRDHLPSSDPVLMQAEASVVMCWVSSEDRSALWALVTFYGGDCQLTLNKKCTHLIVPEPKGEKYECALKRASIKIVTPDWVLDCVSEKTKKDEAFYHPRLIIYEEEEEEEEEEEEVENEEQDSQNEGSTDEKSSPASSQEGSPSGDQQFSPKSNTEKSKGELMFDDSSDSSPEKQERNLNWTPAEVPQLAAAKRRLPQGKEPGLINLCANVPPVPGNILPPEVRGNLMAAGQNLQSSERSEMIATWSPAVRTLRNITNNADIQQMNRPSNVAHILQTLSAPTKNLEQQVNHSQQGHTNANAVLFSQVKVTPETHMLQQQQQAQQQQQQHPVLHLQPQQIMQLQQQQQQQISQQPYPQQPPHPFSQQQQQQQQAHPHQFSQQQLQFPQQQLHPPQQLHRPQQQLQPFQQQHALQQQFHQLQQHQLQQQQLAQLQQQHSLLQQQQQQQIQQQQLQRMHQQQQQQQMQSQTAPHLSQTSQALQHQVPPQQPPQQQQQQQPPPSPQQHQLFGHDPAVEIPEEGFLLGCVFAIADYPEQMSDKQLLATWKRIIQAHGGTVDPTFTSRCTHLLCESQVSSAYAQAIRERKRCVTAHWLNTVLKKKKMVPPHRALHFPVAFPPGGKPCSQHIISVTGFVDSDRDDLKLMAYLAGAKYTGYLCRSNTVLICKEPTGLKYEKAKEWRIPCVNAQWLGDILLGNFEALRQIQYSRYTAFSLQDPFAPTQHLVLNLLDAWRVPLKVSAELLMSIRLPPKLKQNEVANVQPSSKRARIEDVPPPTKKLTPELTPFVLFTGFEPVQVQQYIKKLYILGGEVAESAQKCTHLIASKVTRTVKFLTAISVVKHIVTPEWLEECFRCQKFIDEQNYILRDAEAEVLFSFSLEESLKRAHVSPLFKAKYFYITPGICPSLSTMKAIVECAGGKVLSKQPSFRKLMEHKQNSSLSEIILISCENDLHLCREYFARGIDVHNAEFVLTGVLTQTLDYESYKFN

SEQ ID NO: 2908 - protein, 1298 aa, Homo sapiens [sequence omitted]

SEQ ID NO: 2909 - protein, 104 aa, Homo sapiens
MWELWEYNTRFGWGHSRTISQVENPAKVLNVEPAKVQPRFGVVPPAKAHPSSDPRAEDSWPKCEGSGRPMFRFWWQVLAGRDVCPPICDSFIEPGSRKPFEDVV

SEQ ID NO: 2910 - protein, 143 aa, Homo sapiens
MFSYCVYLRLFCVCVHVCSYHVCMRMCVTVCVRALVRAHVCLVTVCLRLFCVCAHMCLVPCVCVCAWACVFSCCVRVLVLCVCTHVCLVTVCACACFVCVHACLVTACACACFVCVCMCVVTMCACACVLPCVCVHLCVRMCV

SEQ ID NO: 2911 - protein, 143 aa, Homo sapiens
MAFSKDPWLWLLSLLLPIPDSRLRHPSPGQFECSENEHRGAWFLASPAFHQPLWHPLYCDSHKAQRFLFTFKCRKVLCCLVYREASFAHPVFTPCLSYPRGSAGGPGKGQPLTCLATIVILLSAVAAPLAKTSGLRALCGQDF

SEQ ID NO: 2912 - protein, 446 aa, Homo sapiens
MDLAAIEGTSQELTKSHRRNTSGTPSIAVSGTSLSSDQSRSELDLSESFTEDSEDTVSIRSKSVPGALDKDSLEETEESIDALVSSQLSTNTHRLASGLSTTSLNSMMSVYSETGDYGNVKVSGEILLHISYCYKTGGLYIFVKNCRNLAIGDEKKQRTDAYVKSYLLPDKSRNNKRKTKIRTGTNPEFNETLKYTISHTQLETRTLQLSVWHYDRFGRNSFLGEVEIPFDSWNFENPTDEWFVLQPKVEFAPDIGLQYKGELTVVLRYIPPEENLMLPPEQLQGNKTFKKGKKKESPVISGGILEVFIKEAKNLTAVKSGGTSDSFVKGYLLPDDSKATKHKTLVIKKSVNPQWNHTFMFSGIHPQDIKNVCLELTIWDKEAFSSNIFLGGVRLNSGSGVSHGKNVDWMDSQGEEQRLWQKMANNPGTPFEGVLMLRSSMGKCRL

SEQ ID NO: 2913 - protein, 677 aa, Homo sapiens
MNPDGTTLQDGRHDLVVYKGDNKKMEDAKFYLTLPGTKMEMEEKELQASKNLVTFTPSKDSTKDSFQIATLICSTKLTQNVDLLGLLNWRSNSQNIKHNLKKLMEVDGGEIVKFLQDTLDALFNIMMEMSDSETYDFLVFDALVFIISLIGDIKFQHFNPVLETYIYKHFSATLAYVKLSKVLNFYVANADDSSKTELLFAALKALKYLFRFIIQSRVLYLRFYGQSKDGDEFNNSIRQLFLAFNMLMDRPLEEAVKIKGAALKYLPSIINDVKLVFDPVELSVLFCKFIQSIPDNQLVRQKLNCMTKIVESTLFRQSECREVLLPLLTDQLSGQLDDNSNKPDHEASSQLLSNILEVLDRKDVGATAVHIQLIMERLLRRINRTVIGMNRQSPHIGSFVACMIALLQQMDDSHYSHYISTFKTRQDIIDFLMETFIMFKDLIGKNVYAKDWMVMNMTQNRVFLRAINRFAEVLTRFFMDQASFELQLWNNYFHLAVAFLTHESLQLETFSQAKRNKIVKKYGDMRKEIGFRIRDMWYNLGPPKIKFIPSMVGPILEVTLTPEVELRKATIPIFFDMMQCEFNFSGNGNFHMFENELITKLDQEVEGGRGDEQYKVLLEKLLLEHCRKHKYLSSSGEVFALLVSSLLENLLDYRTIIMQDESKENRMSCTVNVLNFY

SEQ ID NO: 2914 - protein, 1277 aa, Homo sapiens
MANRRVGRGCWEVSPTERRPPAGLRGPAAEEEASSPPVLSLSHFCRSPFLCFGDVLLGASRTLSLALDNPNEEVAEVKISHFPAADLGFSVSQRCFVLQPKEKIVISVNWTPLKEGRVREIMTFLVNDVLKHQAILLGNAEEQKKKKRSLWDTIKKKKISASTSHNRRVSNIQNVNKTFSVSQKVDRVRSPLQDCENLAMNEGGPPTENNSLILEENKIPISPISPAFNECHGATCLPLSVRRSTTYSSLHASENRELLNVHSANVSKVSFNEKAVTETSFNSVNVNGQRGENSKLSLTPNCSSTLNITQSQIHFLSPDSFVNNSHEANNELELVTCLSSDMFMKDNSQPVHLESTIAHEIYQKILSPDSFIKDNYGLNQDLESESVNPILSPNQFLKDNMAYMCTSQQTCKVPLSNENSQVPQSPEDWRKSEVSPRIPECQGSKSPKAIFEELVEMKSNYYSFIKQNNPKFSAVQDISSHSHNKQPKRRPILSATVTKRKATCTRENQTEINKPKAKRCLNSAVGEHEKVINNQKEKEDFHSYLPIIDPILSKSKSYKNEVTPSSTTASVARKRKSDGSMEDANVRVAITEHTEVREIKRIHFSPSEPKTSAVKKTKNVTTPISKRISNREKLNLKKKTDLSIFRTPISKTNKRTKPIIAVAQSSLTFIKPLKTDIPRHPMPFAAKNMFYDERWKEKQEQGFTWWLNFILTPDDFTVKTNISEVNAATLLLGIENQHKISVPRAPTKEEMSLRAYTARCRLNRLRRAACRLFTSEKMVKAIKKLEIEIEARRLIVRKDRHLWKDVGERQKVLNWLLSYNPLWLRIGLETTYGELISLEDNSDVTGLAMFILNRLLWNPDIAAEYRHPTVPHLYRDGHEEALSKFTLKKLLLLVCFLDYAKISRLIDHDPCLFCKDAEFKASKEILLAFSRDFLSGEGDLSRHLGLLGLPVNHVQTPFDEFDFAVTNLAVDLQCGVRLVRTMELLTQNWDLSKKLRIPAISRLQKMHNVDIVLQVLKSRGIELSDEHGNTILSKDIVDRHREKTLRLLWKIAFAFQVDISLNLDQLKEEIAFLKHTKSIKKTISLLSCHSDDLINKKKGKRDSGSFEQYSENIKLLMDWVNAVCAFYNKKVENFTVSFSDGRVLCYLIHHYHPCYVPFDAICQRTTQTVECTQTGSVVLNSSSESDDSSLDMSLKAFDHENTSELYKELLENEKKNFHLVRSAVRDLGGIPAMINHSDTSNTIPDEKVVITYLSFLCARLLDLRKEIRAARLIQTTW

SEQ ID NO: 2915 - protein, 164 aa, Homo sapiens
MPLHLAGFFFLAAYSQPCSFSRSPLQGTLPHDSGQQHLKTTADDLLGVCHQQSPGLGQKERTTQSVERTELGRLRVIDVIPQHVEGVVRTAPEVEAVKVLSEVLPPAHIQQVAGELIKALQRGVQNNEHDSQECQSLKPFQVFVSQDPIVLTGDQANLVDHKLL

SEQ ID NO: 2916 - protein, 108 aa, Homo sapiens
MQFLHSVVGLYILVCFCSGWYRFFLSIFSASFRSSCKAGLVVTESLSICLSVKDFISPSLMKLSLAGYEILCLKFFSLRILNIGLHCLLACRVSAERSAVSLWASLCR

SEQ ID NO: 2917 - protein, 1047 aa, Homo sapiens
MAEKRPLRTLGPVMYGKLPRLETDSGLEHSLPHSVGNQDPCTYKGSYFSCPMAGTPKAESEQLASWTPYPPLYSTGMAGPPLQADNLLTNCLFYRSPAEGPEKMQDSSPVELLPFSPQAHSYPGPPLAAPKPVYRNPLCYGLSTCLGEGAVKRPLDVDWTLATGPLLPSADPPCSLAPAPSKGQTLDGTFLRGVPAEGSSKDSSGSFSPCQPFLEKYQTIHSTGFLASRYTGPYPRNSKQAMSEGPSSPWTQLAQPLGPPCQDTGPTHYPPPHHPPPHPPQALPCPPACRHPEKQGSYSPALPLQPLGGHKGTGYQAGGLGSPYLRQQAAQAPYIPPLGLDAYPYPSAPLPAPSPGLKLEPPLTPRCPLDFAPQTLSFPYARDDLSLYGASPGLGGTPPSQNNVRAVPQPGAFQRACQPLPASQPCSEPVRPAQEAEEKTWLPSCRKEKLQPRLSEHSGPPIVIRDSPVPCTPPALPPCARECQSLPQKEDARPPSSPPMPVIDNVFSLAPYRDYLDVPAPEATTEPDSATAEPDSAPATSEGQDKGCRGTLPAQEGPSGSKPLRGSLKEEVALDLSVRKPTAEASPVKASRSVEHAKPTAAMDVPDVGNMVSDLPGLKKIDTEAPGLPGVPVTTDAMPRTNFHSSVAFMFRKFKILRPAPLPAAVVPSTPTSAPAPTQPAPTPTSGPIGLRILAQQPLSVTCFSLALPSPPAVAVASPAPAPAPSPAPARAQAPASARDPAPAPAPVAGPAPASTSAPGDSLEQHFTGLHASLCDAISGSVAHSPPEKLREWLETAGPWGQAAWQDCQGVQGLLAKLLSQLQRFDRTHRCPFPHVVRAGAIFVPIHLVKERLFPRLPPASVDHVLQEHRVELRPTTLSEERALRELALPGCTSRMLKLLALRQLPDIYPDLLGLQWRDCVRRQLGDFDTEAGAVSSSEPTVARDEPESLALAQKSPAPKVRKPGRKPPTPGPEKAEAAAGEESCGASPTPATSASPPGPTLKARFRSLLETAWLNGLALPTWGHKSSRPDQPSPCPQLLDSQSHHL

SEQ ID NO: 2918 - protein, 132 aa, Homo sapiens
MSPSSTWVRNFFTFSNSALACSPSFLSSTPVSERSTIPCSIRDLVRCSMGTVASTSSLTVDDFLSMDPFILLKAGLGSLSSTTVSDRALVVQGESKHFSRIDTKCSSFELVRGNLNQKLLQARKMSVCRSTR

SEQ ID NO: 2919 - protein, 581 aa, Homo sapiens
MPLKHYLLLLVGCQAWGAGLAYHGCPSECTCSRASQVECTGARIVAVPTPLPWNAMSLQILNTHITELNESPFLNISALIALRIEKNELSRITPGAFRNLGSLRYLSLANNKLQVLPIGLFQGLDSLESLLLSSNQLLQIQPAHFSQCSNLKELQLHGNHLEYIPDGAFDHLVGLTKLNLGKNSLTHISPRVFQHLGNLQVLRLYENRLTDIPMGTFDGLVNLQELALQQNQIGLLSPGLFHNNHNLQRLYLSNNHISQLPPSVFMQLPQLNRLTLFGNSLKELSPGIFGPMPNLRELWLYDNHISSLPDNVFSNLRQLQVLILSRNQISFISPGAFNGLTELRELSLHTNALQDLDGNVFRMLANLQNISLQNNRLRQLPGNIFANVNGLMAIQLQNNQLENLPLGIFDHLGKLCELRLYDNPWRCDSDILPLRNWLLLNQPRLGTDTVPVCFSPANVRGQSLIIINVNVVVPSVHVPEVPSYPETPWYPDTPSYPDTTSVSSTTELTSPVEDYTDLTTIQVTDDRSVWGMTQAQSGLAIAAIVIGIVALACSLAACVGCCCCKKRSQAVLMQMKAPNEC

SEQ ID NO: 2920 - protein, 1252 aa, Homo sapiens [sequence omitted]

SEQ ID NO: 2921 - protein, 654 aa, Homo sapiens
MYSSSCETTRNTTGIEESTDGMILGPEDLSYQIYDVSGESNSAVSTEDLKECLKKQLEFCFSRENLSKDLYLISQMDSDQFIPIWTVANMEEIKKLTTDPDLILEVLRSSPMVQVDEKGEKVRPSHKRCIVILREIPETTPIEEVKGLFKSENCPKVISCEFAHNSNWYITFQSDTDAQQAFKYLREEVKTFQGKPIMARIKAINTFFAKNGYRLMDSSIYSHPIQTQAQYASPVFMQPVYNPHQQYSVYSIVPQSWSPNPTPYFETPLAPFPNGSFVNGFNSPGSYKTNAAAMNMGRPFQKNRVKPQFRSSGGSEHSTEGSVSLGDGQLNRYSSRNFPAERHNPTVTGHQEQTYLQKETSTLQVEQNGDYGRGRRTLFRGRRRREDDRISRPHPSTAESKAPTPKFDLLASNFPPLPGSSSRMPGELVLENRMSDVVKGVYKEKDNEELTISCPVPADEQTECTSAQQLNMSTSSPCAAELTALSTTQQEKDLIEDSSVQKDGLNQTTIPVSPPSTTKPSRASTASPCNNNINAATAVALQEPRKLSYAEVCQKPPKEPSSVLVQPLRELRSNVVSPTKNEDNGAPENSVEKPHEKPEARASKDYSGFRGNIIPRGAAGKIREQRRQFSHRAIPQGVTRRNGKEQYVPPRSPK

SEQ ID NO: 2922 - protein, 1224 aa, Homo sapiens [sequence omitted]

SEQ ID NO: 2923 - protein, 243 aa, Homo sapiens [sequence omitted]

SEQ ID NO: 2924 - protein, 944 aa, Homo sapiens
MPLAGMSLGSLKSEFVPSTSTKQQGPQPTLSVGQESSSPEDHVCLLDCVVVDLQDMDIFAAERHPREYSKAPEDSSGDLIFPSYFVRQTGGSLLTEPCRLKLQVERNLDKEISHTVPDISIHGNLSSVHCSLDLYKYKLIRGLLENNLGEPIEEFMRPYDLQDPRIHTVLSGEVYTCMCFLIDMVNVSLELKDPKRKEGAGSLARFDFKKCKLLYESFSNQTKSINLVSHSMMAFDTRYAGQKTSPGMTNVFSCIFQPAKNSSTTQGSIQIELHFRSTKDSSCFTVVLNNLRVFLIFDWLLLVHDFLHTPSDIKKQNHVTPSRHRNSSSESAIVPKTVKSGVVTKRSSLPVSNERHLEVKVNVTGTEFVVIEDVSCFDTNAIILKGTTVLTYKPRFVDRPFSGSLFGIEVFSCRLGNEHDTALSIVDPVQIQMELVGNSSYQNSSGLMDAFNSEDFPPVLEIQLQALDIRLSYNDVQLFLAIAKSIPEQANAAVPDSVALESDSVGTYLPGASRVGEEIREGTRHTLDPVLELQLARLQELGFSMDDCRKALLACQGQLKKAASWLFKNAEPLKSLSLASTSRDSPGAVAAPLISGVEIKAESVCICFIDDCMDCDVPLAELTFSRLNFLQRVRTSPEGYAHFTLSGDYYNRALSGWEPFIEPWPCSVSWQQQAASRLHPPRLKLEAKAKPRLDINITSVLIDQYVSTKESWMADYCKDDKDIESAKSEDWMGSSVDPPCFGQTEVKTPKRRQPFVPFALRNHTGCTLWFATLTTTPTRAALSHSGSPGVVPEGNGTFLDDTHNVSEWREVLTGEEIPFEFEARGKLRHRHTHDLRIHQLQVRVNGWEQVSPVSVDKVGTFFRYAAPDKNSSSSTIGSPSSRTNIIHPQVYFSSLPPVRVVFAVTMEGSARKVITVRSALIVRNRLETPMELRLDSPSAPDSMF

SEQ ID NO: 2925 - protein, 293 aa, Homo sapiens [sequence omitted]

SEQ ID NO: 2926 - protein, 286 aa, Homo sapiens [sequence omitted]

SEQ ID NO: 2927 - protein, 272 aa, Homo sapiens
MFENLNTALTPKLQASRSFPHLSKPVAPGSAPLGSGEPGGPGLWVGSSQHLKNLGKAMGAKVNDFLRRKEPSSLGSVGVTEINKTAGAQLASGTDAAPEAWLEDERSVLQETFPRLDPPPPITRKRTPRALKTTQDMLISSQPVLSSLEYGTEPSPGQAQDSAPTAQPDVPADASQPEATMEREERGKVLPNGEVSLSVPDLIHKDSQDESKLKMTECRRASSPSLIERNGFKLSLSPISLAESWEDGSPPPQARTSSLDNEGPHPDLLSFE

SEQ ID NO: 2928 - protein, 129 aa, Homo sapiens
MLPRLVSNSWPQSDPPAWAFQSAGITGVSCRARPQLFLVNPFLSPRVLALTLHSRFIGACSKPGAGDEEEKDPSYPSIGFFWKGGRNADLTLYFTVICDLCYGRGKHSAWEQGDVASSPGSGRQGTVKA

SEQ ID NO: 2929 - protein, 553 aa, Homo sapiens
MNKNTSTVVSPSLLEKDPAFQMITIAKETGLGLKVLGGINRNEGPLVYIQEIIPGGDCYKDGRLKPGDQLVSVNKESMIGVSFEEAKSIITRAKLRLESAWEIAFIRQKSDNIQPENLSCTSLIEASGEYGPQASTLSLFSSPPEILIPKTSSTPKTNNDILSSCEIKTGYNKTVQIPITSENSTVGLSNTDVASAWTENYGLQEKISLNPSVRFKAEKLEMALNYLGIQPTKEQHQALRQQVQADSKGTVSFGDFVQVARNLFCLQLDEVNVGAHEISNILDSQLLPCDSSEADEMERLKCERDDALKEVNTLKEKLLESDKQRKQLTEELQNVKQEAKAVVEETRALRSRIHLAEAAQRQAHGMEMDYEEVIRLLEAKITELKAQLADYSDQNKESVQDLKKRIMVLDCQLRKSEMARKTFEASTEKLLHFVEAIQEVFSDNSTPLSNLSERRAVLASQTSLTPLGRNGRSIPATLALESKELVKSVRALLDMDCLPYGWEEAYTADGIKYFINHVTQTTSWIHPVMSVLNLSRSEENEEDCSRELPNQKS

SEQ ID NO: 2930 - protein, 116 aa, Homo sapiens [sequence omitted]

SEQ ID NO: 2931 - protein, 133 aa, Homo sapiens [sequence omitted]

SEQ ID NO: 2932 - protein, 261 aa, Homo sapiens
MLPGWDLCNSGMIKDYSGVNLFSRKVLDLSDKYTATLPNQVGIPRGLENNCDSLRESDTIVYLLSRLFLVNKLVNMPLELACRVGSSFRMESIHNKMRGAGNDILNMSSFYSCLRNGKNESHVPEADLSLLKLISCWRDQSVQVTEAIQAVLLAEVQQHMKSLGKIPVNSQPVSMAENGNCEMKQMLPKLEWTEELELQCVRNTLPLQTPVSPVKHDSNSNSANFQDVEDMPDRCALEESESPGEPRHHSWIAKVCPCKVS

SEQ ID NO: 2933 - protein, 1020 aa, Homo sapiens [sequence omitted]

SEQ ID NO: 2934 - protein, 220 aa, Homo sapiens
MEDQMNEMKCEEKFREKRIKRNEQSLQEIWDYVKRPNLRLIAVPESDGENGTKLENTLRDIIQENFPPDNLVRQANIQIQEIQRTPQRYPPRRATPRHIIVRFTKVEMKEKILRVAREQGRVTHKGKRIRQTADLSAETLKARREWGPIFNILKEQNFQARISYPAKLSFISEGEIKCFTNKQMLRDFVTTRPAAKELLKEALNMERNNWYQPLQKHAKL

SEQ ID NO: 2935 - protein, 118 aa, Homo sapiens [sequence omitted]

SEQ ID NO: 2936 - protein, 708 aa, Homo sapiens
MRERIWAPPLLLLLPLLLPPPLWGGPPDSPRRELELEPGPLQPFDLLYASGAAAYYSGDYERAVRDLEAALRSHRRLREIRTRCARHCAARHPLPPPPPGEGPGAELPLFRSLLGRARCYRSCETQRLGGPASRHRVSEDVRSDFQRRVPYNYLQRAYIKLNQLEKAVEAAHTFFVANPEHMEMQQNIENYRATAGVEALQLVDREAKPHMESYNAGVKHYEADDFEMAIRHFEQALREYFVEDTECRTLCEGPQRFEEYEYLGYKAGLYEAIADHYMQVLVCQHECVRELATRPGRLSPIENFLPLHYDYLQFAYYRVGEYVKALECAKAYLLCHPDDEDVLDNVDYYESLLDDSIDPASIEAREDLTMFVKRHKLESELIKSAAEGLGFSYTEPNYWIRYGGRQDENRVPSGVNVEGAEVHGFSMGKKLSPKIDRDLREGGPLLYENITFVYNSEQLNGTQRVLLDNVLSEEQCRELHSVASGIMLVGDGYRGKTSPHTPNEKFEGATVLKALKSGYEGRVPLKSARLFYDISEKARRIVESYFMLNSTLYFSYTHMVCRTALSGQQDRRNDLSHPIHADNCLLDPEANECWKEPPAYTFRDYSALLYMNDDFEGGEFIFTEMDAKTVTASIKPKCGRMISFSSGGENPHGVKAVTKGKRCAVALWFTLDPLYRELERIQADEVIAILDQEQQGKHELNINPKDEL

SEQ ID NO: 2937 - protein, 120 aa, Homo sapiens
MSLRRLCGPQQAGGLTWEQRLQGWHLHTIPLHRAFLRFLSVVGILPPQLAAPCLLWLHTGSLGNFKKALMPGLHFGQYNQSLRAALGGGVCGVSWTHTLPASGSSDRVLRTAEYLEVSSS

SEQ ID NO: 2938 - protein, 178 aa, Homo sapiens [sequence omitted]

SEQ ID NO: 2939 - protein, 1330 aa, Homo sapiens
MPLSPPAQGDPGEPSPCRPPKKHTTFHLWRSKKKQQPAPPDCGVFVPHPLPAPAGEARALDVVDGKYVVRDSQEFPLHCGESQFFHTTSEALGSLLLESGIFKKSRAQPPEDNRRKPVLGKLGTLFTAGRRRNSRNGLESPTRSNAKPLSPKDVVASPKLPERESERSRSQSSQLKQTDTSEEGSPRENPREAEGELPESGGPAAPPDAELSPRWSSSAAAVAVQQCHENDSPQLEPLEAEGEPFPDATTTAKQLHSSPGNSSRQENAETPARSPGEDASPGAGHEQEAFLGVRGAPGSPTQERPAGGLGEAPNGAPSVCAEEGSLGPRNARSQPRKGASDLPGEPPAEGAAHTASSAQADCTARPKGHAHPAKVLTLDIYLSKTEGAQVDEPVVITPRAEDCGDWDDMEKRSSGRRSGRRRGSQKSTDSPGADAELPESAARDDAVFDDEVAPNAASDNASAEKKVKSPRAALDGGVASAASPESKPSPGTKGQLRGESDRSKQPPPASSPTKRKGRSRALEAVPAPPASGPRAPAKESPPKRVPDPSPVTKGTAAESGEEAARAIPRELPVKSSSLLPEIKPEHKRGPLPNHFNGRAEGGRSRELGRAAGAPGASDADGLKPRNHFGVGRSTVTTKVTLPAKPKHVELNLKTPKNLDSLGNEHNPFSQPVHKGNTATKISLFENKRTNSSPRHTDIRGQRNTPASSKTFVGRAKLNLAKKAKEMEQPEKKVMPNSPQNGVLVKETAIETKVTVSEEEILPATRGMNGDSSENQALGPQPNQDDKADVQTDAGCLSEPVASALIPVKDHKLLEKEDSEAADSKSLVLENVTDTAQDIPTTVDTKDLPPTAMPKPQHTFSDSQSPAESSPGPSLSLSAPAPGDVPKDTCVQSPISSFPCTDLKVSENHKGCVLPVSRQNNEKMPLLELGGETTPPLSTERSPEAVGSECPSRVLVQVRSFVLPVESTQDVSSQVIPESSEVREVQLPTCHSNEPEVVSVASCAPPQEEVLGNEHSHCTAELAAKSGPQVIPPASEKTLPIQAQSQGSRTPLMAESSPTNSPSSGNHLATPQRPDQTVTNGQDSPASLLNISAGSDDSVFDSSSDMEKFTEIIKQMDSAVCMPMKRKKARMPNSPAPHFAMPPIHEDHLEKVFDPKVFTFGLGKKKESQPEMSPALHLMQNLDTKSKLRPKRASAEQSVLFKSLHTNTNGNSEPLVMPEINDKENRDVTNGGIKRSRLEKSALFSSLLSSLPQDKIFSPSVTSVNTMTTAFSTSQNGSLSQSSVSQPTTEGAPPCGLNKEQSNLLPDNSLKVFNFNSSSTSHSSLKSPSHM

SEQ ID NO: 2940 - protein, 959 aa, Homo sapiens
MGGGSGEEQLYADFPELDLSQLDASDFDSATCFGELQWCPENSETEPNQYSPDDSELFQIDSENEALLAELTKTLDDIPEDDVGLAAFPALDGGDALSCTSASPAPSSAPPSPAPEKPSAPAPEVDELSLADSTQDKKAPMMQSQSRSCTELHKHLTSAQCCLQDRGLQPPCLQSPRLPAKEDKEPGEDCPSPQPAPASPRDSLALGRADPGAPVSQEDMQAMVQLIRYMHTYCLPQRKLPPQTPEPLPKACSNPSQQVRSRPWSRHHSKASWAEFSILRELLAQDVLCDVSKPYRLATPVYASLTPRSRPRPPKDSQASPGRPSSVEEVRIAASPKSTGPRPSLRPLRLEVKREVRRPARLQQQEEEDEEEEEEEEEEEKEEEEEWGRKRPGRGLPWTKLGRKLESSVCPVRRSRRLNPELGPWLTFADEPLVPSEPQGALPSLCLAPKAYDVERELGSPTDEDSGQDQQLLRGPQIPALESPCESGCGDMDEDPSCPQLPPRDSPRCLMLALSQSDPTFGKKSFEQTLTVELCGTAGLTPPTTPPYKPTEEDPFKPDIKHSLGKEIALSLPSPEGLSLKATPGAAHKLPKKHPERSELLSHLRHATAQPASQAGQKRPFSCSFGDHDYCQVLRPEGVLQRKVLRSWEPSGVHLEDWPQQGAPWAEAQAPGREEDRSCDAGAPPKDSTLLRDHEIRASLTKHFGLLETALEEEDLASCKSPEYDTVFEDSSSSSGESSFLPEEEEEEGEEEEEDDEEEDSGVSPTCSDHCPYQSPPSKANRQLCSRSRSSSGSSPCHSWSPATRRNFRCESRGPCSDRTPSIRHARKRREKAIGEGRVVYIQNLSSDMSSRELKRRFEVFGEIEECEVLTRNRRGEKYGFITYRCSEHAALSLTKGAALRKRNEPSFQLSYGGLRHFCWPRYTDYDSNSEEALPASGKSKYEAMDFDSLLKEAQQSLH

SEQ ID NO: 2941 - protein, 393 aa, Homo sapiens [sequence omitted]

SEQ ID NO: 2942 - protein, 142 aa, Homo sapiens
MGSWAFHITPFLLRLSESHRPFPWISFGAKKQRSFVFVFSLWNDFLLSVLFKFRRSYSGICTFPCYSSCLMNFIHLHFSMWLAWTGGRTLWPHGTLRTQGRASAGKELPGLTELHLTVLFLAIFCCLFLCVDFVPGKIFHSE

SEQ ID NO: 2943 - protein, 1309 aa, Homo sapiens [sequence omitted]

SEQ ID NO: 2944 - protein, 129 aa, Homo sapiens [sequence omitted]

SEQ ID NO: 2945 - protein, 122 aa, Homo sapiens
MWGGFALVAIGLQFGLKMTQFLVLRWRGIALKFACTRLSASIYMTDIFVTHRRCPWYRVYAYISIFILGTHELLLIISLYLLESVFEKKKKNFCFDLWWIHLLKIINLEDIRNDIQNKYSER

SEQ ID NO: 2946 - protein, 396 aa, Homo sapiens [sequence omitted]

SEQ ID NO: 2947 - protein, 531 aa, Homo sapiens
MRNLATIFLAVVMALLSLHCLAAFKRLEHKEVLVGLLFLVFPFIPASNLFFRVGFVVAERVLYMPSMGYCILFVHGLSKLCTWLNRCGATTLIVSTVLLLLLFSWKTVKQNEIWLSRESLFRSGVQTLPHNAKVHYNYANFLKDQGRNKEAIYHYRTALKLYPRHASALNNLGTLTRDTAEAKMYYQRALQLHPQHNRALFNLGNLLKSQEKKEEAITLLKDSIKYGPEFADAYSSLASLLAEQERFKEAEEIYQTGIKNCPDSSDLHNNYGVFLVDTGLPEKAVAHYQQAIKLSPSHHVAMVNLGRLYRSLGENSMAEEWYKRALQVAHKAEILSPLGALYYNTGRYEEALQIYQEAAALQPSQRELRLALAQVLAVMGQTKEAEKMTNHIVSEETGCLECYRLLSAIYSKQENHDKALDAIDKALQLKPKDPKVISELFFTKGNQLREQNLLDKAFESYRVAVQLNPDQAQAWMNMGGIQHIKGKYVSARAYYERALQLVPDSKLLKENLAKLDRLEKRLQEVREKDQT

SEQ ID NO: 2948 - protein, 409 aa, Homo sapiens
MRRYLRVVVLCVACGFCSLLYAFSQLAVSLEEGTGGGGGKPQAAVASWLAGGGRGAVRGAGVAGPAAHPGVSDRYSLKIQPVEKMHLAVVACGERLEETMTMLKSAIIFSIKPLQFHIFAEDQLHHSFKGRLDNWSFLQTFNYTLYPITFPSENAAEWKKLFKPCASQRLFLPLILKEVDSLLYVDTDILFLRPVDDIWSLLKKFNSTQIAAMAPEHEEPRIGWYNRFARHPYYGKTGVNSGVMLMNMTRMRRKYFKNDMTTVRLQWGDILMPLLKKYKLNITWGDQDLLNIVFFHNPESLFVFPCQWNYRPDHCIYGSNCQEAEEGGIFILHGNRGVYHDDKQPAFRAVYEALRNCSFEDDNIRSLLKPLELELQKTVHTYCGKIYKIFIKQLAKSVRDRYARSPKEK

SEQ ID NO: 2949 - protein, 336 aa, Homo sapiens
MNNNTTCIQPSMISSMALPIIYILLCIVGVFGNTLSQWIFLTKIGKKTSTHIYLSHLVTANLLVCSAMPFMSIYFLKGFQWEYQSAQCRVVNFLGTLSMHASMFVSLLILSWIAISRYATLMQKDSSQETTSCYEKIFYGHLLKKFRQPNFARKLCIYIWGVVLGIIIPVTVYYSVIEATEGEESLCYNRQMELGAMISQIAGLIGTTFIGFSFLVVLTSYYSFVSHLRKIRTCTSIMEKDLTYSSVKRHLLVIQILLIVCFLPYSIFKPIFYVLHQRDNCQQLNYLIETKNILTCLASARSSTDPIIFLLLDKTFKKTLYNLFTKSNSAHMQSYG

SEQ ID NO: 2950 - protein, 373 aa, Homo sapiens [sequence omitted]

SEQ ID NO: 2951 - protein, 111 aa, Homo sapiens
MHHTEGPHGTRPLRPGILMQKTHATFLRIALTNTQRDVKGWTSFHTPADAELGVASHRPGSVLQARPLLAVRLWAGKQKAGKELSCTCFLIVFSPTILHISGRHILVSRNS

SEQ ID NO: 2952 - protein, 154 aa, Homo sapiens
MNRCARCRIENCDSCFSKDFCTKCKVGFYLHRGRCFDECPDGFAPLEETMECVEGCEVGHWSEWGTCSRNNRTCGFKWGLETRTRQIVKKPVKDTILCPTIAESRRCKMTMRHCPGGKRTPKAKEKRNKKKKRKLIERAQEQHSVFLATDRANQ

SEQ ID NO: 2953 - protein, 139 aa, Homo sapiens [sequence omitted]

SEQ ID NO: 2954 - protein, 213 aa, Homo sapiens
MVTSWSACTRSCGGGVQTRRVTCQKLKASGISTPVSNDMCTQVAKRPVDTQACNQQLCVEWAFSSWGQCNGPCIGPHLAVQHRQVFCQTRDGITLPSEQCSALPRPVSTQNCWSEACSVHWRVSLWTLCTATCGNYGFQSRRVECVHARTNKAVPEHLCSWGPRPANWQRCNITPCENMECRDTTRYCEKVKQLKLCQLSQFKSRCCGTCGKA

SEQ ID NO: 2955 - protein, 123 aa, Homo sapiens
MCVRRSLVGLTFCTCYLASYLTNKYVLSVLKFTYPTLFQGSHVLVWLPASVLFVGIIYAGSRALSRLAIPVFLTLHNVAEVIICGYQKCFQKEKTSPAKICRLHLERTRQNQTSRLSSCLKGD

SEQ ID NO: 2956 - protein, 333 aa, Homo sapiens
MISTRYRRRRDAPRGPGRCPPHPTRPRGPGRKRGAAGSPGAAPSASRRPEFPKPLRVLPWRERGRGGREWPMSLRSPLPTSACGWGESGRRAGPGRAPCGPRTGLSARAVLLSARARLVSSVHAVLATGSGIVIIRSCDDVITGRHWLAREYVWFLIPYMIYDSYAMYLCEWCRTRDQNRAPSLTLRNFLSRNRLMITHHAVILFVLVPVAQRLRGDLGDFFVGCIFTAELSTPFVSLGRVLIQLKQQHTLLYKVNGILTLATFLSCRILLFPFMYWSYGRQQGLSLLQVPFSIPFYCNVANAFLVAPQIYWFCLLCRKAVRLFDTPQAKKDG

SEQ ID NO: 2957 - protein, 129 aa, Homo sapiens
MYRQRFLYSLYRHTHWVRCAKFSPDGRLIVSCSEDKTIKIWDTTNKQCVNNFSDSVGDLSLLFHFQKVESYLHQEVQTHRSYYGGLTLMNCIVKVLPKEISKDYILIHHHIFLISTQEHHIPMRKKLRL

SEQ ID NO: 2958 - protein, 191 aa, Homo sapiens [sequence omitted]

SEQ ID NO: 2959 - protein, 467 aa, Homo sapiens
MRVSSHKQPALKATSDKENSVPNMATETKDEQISGTVSSQKQPALKATSDKKDSVSNIPTEIKDGQQSGTVSSQKQPAWKATSVKKDSVSNIATEIKDGQIRGTVSSQRQPALKATGDEKDSVSNIAREIKDGEKSGTVSPQKQSAQKVIFKKKVSLLNIATRITSGWKSGTEYPENLPTLKATIENKNSVLNTATKMKDVQTSTPEQDLEMASEGEQKRLEEYENNQPQVKNQIHSRDDLDDIIQSSQTVSEDGDSLCCNCKNVILLIDQHEMKCKDCVHLLKIKKTFCLCKRLTELKDNHCEQLRVKIRKLKNKASVLQKRLSEKEEIKSQLKHETLELEKELCSLRFAIQQEKKKRRNVEEVHQKVREKLRITEEQYRIEADVTKPIKPALKSAEVELKTGGNNSNQVSETDEKEDLLHENRLMQDEIARLRLEKDTIKNQNLEKKYLKDFEIVKRKHEDLQKA

SEQ ID NO: 2960 - protein, 202 aa, Homo sapiens
MHSEPGARLVLTLQTLSRALSNLKACWGCNVTFTHAGPFQKSARSCNWCYFSCSGTMCSTTGVSALPKSKFHLSAKCRGICFLLSSHRIVGHLFAGLLRDFLAIYLQAFFPSPKFLGWLCLLKEPVFTKLHSGASVRCLRSYCRPFRTPSQERTLQPLARDSTFFLILFLTLLLLLLPTNSISFFFLFLSFSYSSFPPSLSC

SEQ ID NO: 2961 - protein, 202 aa, Homo sapiens [sequence omitted]

SEQ ID NO: 2962 - protein, 122 aa, Homo sapiens [sequence omitted]

SEQ ID NO: 2963 - protein, 939 aa, Homo sapiens [sequence omitted]

SEQ ID NO: 2964 - protein, 102 aa, Homo sapiens
MGCDNTCEMLLTKEAQLETQHPEVFFVVVVVLVFFWRGGGSCSDAQAGMQWHDLGSLQPPPPGFKRSSGLSFPNSWNYRRAPASSANFCIFSRDGVSPCWPG

SEQ ID NO: 2965 - protein, 806 aa, Homo sapiens
MSASPDNLSTGGRLQNMTVDECLQSRNTVLQGQPFGGVPTVLCLNIALWVLVLVVYSFLRKAAWDYGRLALLIHNDSLTSLIYGEQSEKTSPSETSLEMERRDKGFCSWFFNSITMKDEDLINKCGDDARIYIVFQYHLIIFVLIICIPSLGIILPINYTGSVLDWSSHFARTTIVNVSTESKLLWLHSLLSFFYFITNFMFMAHHCLGFAPRNSQKVTRTLMITYVPKDIEDPELIIKHFHEAYPGSVVTRVHFCYDVRNLIDLDDQRRHAMRGRLFYTAKAKKTGKVMIRIHPCARLCFCKCWTCFKEVDAEQYYSELEEQLTDEFNAELNRVPLKRLDLIFVTFQDSRMAKRVRKDYKYVQCGVQPQQSSVTTIVKSYYWRVTMAPHPKDIIWKHLSVRRFFWWARFIAINTFLFFLFFFLTTPAIIMNTIDMYNVTRPIEKLQNPIVTQFFPSVMLWGFTVILPLIVYFSAFLEAHWTRSSQNLVMVHKCYIFLVFMVVILPSMGLTSLDVFLRWLFDIYYLEQASIRFQCVFLPDNGAFFVNYVITAALLGTGMELLRLGSLFCYSTRLFFSRSEPERVNIRKNQAIDFQFGREYAWMMNVFSVVMAYSITCPIIVPFGLLYLCMKHLTDRYNMYYSFAPTKLNEQIHMAAVSQAIFAPLLGLFWMLFFSILRLGSLHAITIFSLSTLLIAMVIAFVGIFLGKLRMVADYEPEEEEIQTVFDMEPSSTSSTPTSLLYVATVLQEPELNLTPASSPARHTYGTMNNQPEEGEEESGLRGFARELDSAQFQEGLELEGQNQYH

SEQ ID NO: 2966 - protein, 150 aa, Homo sapiens [sequence omitted]

SEQ ID NO: 2967 - protein, 104 aa, Homo sapiens [sequence omitted]

SEQ ID NO: 2968 - protein, 107 aa, Homo sapiens
MGHSNLCLLRDCKHGLQWIRESSSVIVLMAKNKAQGLPELNEPCSGQHGASAPQLGSMILVFNYTLLAVVGGKHSRASVTTIRRNTLGMSGKLQIPHPSTVPSASSD

SEQ ID NO: 2969 - protein, 320 aa, Homo sapiens
MAEMIATEREYIRCLGYVIDNYFPEMERMDLPQGLRGKHHVIFGNLEKLHDFHQQHFLRELERCQHCPLAVGRSFLRHEEQFGMYVIYSKNKPQSDALLSSHGNAFFKDKQRELGDKMDLASYLLRPVQRVAKYALLLQDLLKEASCGLAQGQELGELRAAEVVVCFQLRHGNDLLAMDAIRGCDVNLKEQGQLRCRDEFIVCCGRKKYLRHVFLFEDLILFSKTQKVEGSHDVYLYKQSFKTAEIGMTENVGDSGLRFEIWFRRRRKSQDTYILQASSAEVKSAWTDVIGRILWRQALKSRGRRGTPPRQRDLGSHRHE

SEQ ID NO: 2970 - protein, 201 aa, Homo sapiens
MSTLSGRPFSSLLLEQGDHRGATWLGRGGGAGPGQSGPGHGQGTATPGPGQVRAAQARARRGGGARERPAEGAREPGAARRGARAGPGAHLRAARTLRARAQTPQLRREAACAGSFFPKCRQSPRSHGQPFRQLQSHWQAPRQGWPAQEGGGRRPSRREEAAALAGGGKRTAPGLRGRGGRAAAGQGGDRHPDRWRRQRSK

SEQ ID NO: 2971 - protein, 164 aa, Homo sapiens [sequence omitted]

SEQ ID NO: 2972 - protein, 321 aa, Homo sapiens
MAANIVAKRKSLSATVVVYVNGGWSSWTEWSACNVRCGRGWQKRSRTCTNPAPLNGGAFCEGMSVQKITCTSLCPVDGSWEVWSEWSVCSPECEHLRIRECTAPPPRNGGKFCEGLSQESENCTDGLCILGIENASDIALYSGLGAAVVAVAVLVIGVTLYRRSQSDYGVDVIDSSALTGGFQTFNFKTVRQGNSLLLNSAMQPDLTVSRTYSGPICLQDPLDKELMTESSLFNPLSDIKVKVQSSFMVSLGVSERAEYHGKNHSRTFPHGNNHSFSTMHPRNKMPYIQNLSSLPTRTELRTTGVFGHLGGRLVMPNTGGW

SEQ ID NO: 2973 - protein, 341 aa, Homo sapiens
MPQPRGGQPAWQLTPSPPPSSRIMSTHVAGLGLDKMKLGNPQSFLDQEEADDQQLLEPEAWKTYTERRNALREFLTSDLSPHLLKRHHARMQLLRKCSYYIEVLPKHLALGDQNPLVLPSALFQLIDPWKFQRMKKVGTAQTKIQLLLLGDLLEQLDHGRAELDALLRSPDPRPFLADWALVERRLADVSAVMDSFLTMMVPGRLHVKHRLVSDVSATKIPHIWLMLSTKMPVVFDRKASAAHQDWARLRWFVTIQPATSEQYELRFRLLDPRTQQECAQCGVIPVAACTFDVRNLLPNRSYKFTIKRAETSTLVYEPWRDSLTLHTKPEPLEGPALSHSV

SEQ ID NO: 2974 - protein, 822 aa, Homo sapiens
MNWNKGGPGTKRGFGFGGFAISAGKKEEPKLPQQSHSAFGATSSSSGFGKSAPPQLPSFYKIGSKRANFDEENAYFENEEEDSSNVDLPYIPAENSPTRQQFHSKPVDSDSDDDPLEAFMAEVEDQAARDMKRLEEKDKERKNVKGIRDDIEEEDDQEAYFRYMAENPTAGVVQEEEEDNLEYDSDGNPIAPTKKIIDPLPPIDHSEIDYPPFEKNFYNEHEEITNLTPQQLIDLRHKLNLRVSGAAPPRPGSSFAHFGFDEQLMHQIRKSEYTQPTPIQCQGVPVALSGRDMIGIAKTGSGKTAAFIWPMLIHIMDQKELEPGDGPIAVIVCPTRELCQQIHAECKRFGKAYNLRSVAVYGGGSMWEQAKALQEGAEIVVCTPGRLIDHVKKKATNLQRVSYLVFDEADRMFDMGFEYQVRSIASHVRPDRQTLLFSATFRKKIEKLARDILIDPIRVVQGDIGEANEDVTQIVEILHSGPSKWNWLTRRLVEFTSSGSVLLFVTKKANAEELANNLKQEGHNLGLLHGDMDQSERNKVISDFKKKDIPVLVATDVAARGLDIPSIKTVINYDVARDIDTHTHRIGRTGRAGEKGVAYTLLTPKDSNFAGDLVRNLEGANQHVSKELLDLAMQNAWFRKSRFKGGKGKKLNIGGGGLGYRERPGLGSENMDRGNNNVMSNYEAYKPSTGAMGDRLTAMKAAFQPQYKSHFVAASLSNQKAGSSAAGASGWTSAGSLNSVPTNSAQQGHNSPDSPVTLNISGLSVSFSCLLSGPLAAAGMCVCEGLLPIPLAPGAWCLKRWCVPCQATLKNIYVQQQYNSTR

SEQ ID NO: 2975 - protein, 207 aa, Homo sapiens
MALQLRWFKHRRPFFLLLIAQLCVHWPPHLPPDQRGFCLPQHCQPGVFLDSSPGPPSAPLPPSALTSRPPSLLLGNLAWVGLPSQPSRLFFLSLAACLAHHCGQVSLSENTISSHHGPGYKAVSHLPITSDQIRTLRLWIEADATVPGKPHCPPIPALASVPVRSCTMLLSAILPSPALPACWSCIALHLTDSYSTALASPKHTWPS

SEQ ID NO: 2976 - protein, 124 aa, Homo sapiens [sequence omitted]

SEQ ID NO: 2977 - protein, 139 aa, Homo sapiens
MYNPWQVGASLAPARAGPRPFPTPRARPPDCSGGHAPSGFPALGLRTAQRPRPFSSSPRSASGRLRGPRPVARGPAHSSSPTGLPAYLPPAAALDSQTSAPTVSPVTRPRVVARGKTPRVSLAGLETLSSLLHQQQLFD

SEQ ID NO: 2978 - protein, 128 aa, Homo sapiens
MGTAAGAEGPCPWGARRAGRQQARASLTERTPAEGLALRGAGQGHTGVLPLPGQRDGVVGRWQQASFRRDAQEATLNEPHLLRVRFDLFLRPRRINSDLIGFGAGRRGVRLASPLPALLPCTDVICVS

SEQ ID NO: 2979 - protein, 235 aa, Homo sapiens
MVKDDDPSWKPTFIVKPDGGCQGDGIYLIKDPSDIRLAGTLQSRPAVVQEYICKPLLIDKLKFDIRLYVLLKSLDPLEIYIAKDGLSRFCTEPYQEPTPKNLHRIFMHLTNYSLNIHSGNFIHSDSASTGSKRTFSSILCRLSSKGVDIKKVWSDIISVVIKTVIALTPELKVFYQSDIPTGRPGPTCFQILGFDILLMKNLKPILLEVNANPSMRIEHEHEGCLKMSPASLMKK

SEQ ID NO: 2980 - protein, 202 aa, Homo sapiens
MGSEQYDADAEETGLDGSWGFPGKPFTTIHMGVPHSGPTLTPRTGSSDVADQLWAQERKHPTRLGWQEFGLSTDPIKLPCNSENVTWLKPRPISRCLARPSSPLVPSCSPKTAGTLRQPTLEQAQQVVIRAHQEQLDEMAELGFKEETLMSQLASNDFEDFVTQLDEIMVLKSKCIQSLRSQLQLYLTCHGPTAAPEGTVPS

SEQ ID NO: 2981 - protein, 1420 aa, Homo sapiens
MRLVASELHTSLYSSMVGADRLGTLATALLAFPSVGPTFPTYYAHADTLCSVKSEEVLRGLGKLILKRSGGKELEGKGQKACPTREQLLMNALLYLRSHVLCKGELDQRALQLFRHVCQEIISEWDEQERIAQEKAEQESGLYRYRSRNSRTALSEEEEEEREFRKQFPLHEKDFADILVQPTLEENKGTSDGQEEEAGTNPALLSQNSMQAVMLIHQQLCLNFARSLWYQQTLPPHEAKHYLSLFLSCYQTGASLVTHFYPLMGVELNDRLLGSQLLACTLSHNTLFGEAPSDLMVKPDGPYDFYQHPNVPEARQCQPVLQGFSEAVSHLLQDWPEHPALEQLLVVMDRIRSFPLSSPISKFLNGLEILLAKAQDWEENASRALSLRKHLDLISQMIIRWRKLELNCWSMSLDNTMKRHTEKSTKHWFSTYQMLEKHMQEQTEEQEDDKQMTLMLLVSTLQAFIEGSSLGEFHVRLQMLLVFHCHVLLMPQVEGKDSLCSVLWNLYHYYKQFFDRVQAKIVELRSPLEKELKEFVKISKWNDVSFWSIKQSVEKTHRTLFKFMKKFEAVLSEPCRSSLVESDKEEQPDFLPRPTDGAASELSSIQNLNRALRETLLAQPAAGQATIPEWCQGSAPSGLEGELLRRLPKLRKRMRKMCLTFMKESPLPRLVEGLDQFTGEVISSVSELQSLKVEPSAEKEKQRSEAKHILMQKQRALSDLFKHLAKIGLSYRKGLAWARSKNPQEMLHLHPLDLQSALSIVSSTQEADSRLLTEISSSWDGCQKYFYRSLARHARLNAALATPAKEMGMGNVERCRGFSAHLMKMLVRQRRSLTTLSEQWIILRNLLSCVQEIHSRLMGPQAYPVAFPPQDGVQQWTERLQHLAMQCQILLEQLSWLLQCCPSVGPAPGHGNVQVLGQPPGPCLEGPELSKGQLCGVVLDLIPSNLSYPSPIPGSQLPSGCRMRKQDHLWQQSTTRLTEMLKTIKTVKADVDKIRQQSCETLFHSWKDFEVCSSALSCLSQVSVHLQGLESLFILPGMEVEQRDSQMALVESLEYVRGEISKAMADFTTWKTHLLTSDSQGGNQMLDEGFVEDFSEQMEIAIRAILCAIQNLEERKNEKAEENTDQASPQEDYAGFERLQSGHLTKLLEDDFWADVSTLHVQKIISAISELLERLKSYGEDGTAAKHLFFSQSCSLLVRLVPVLSSYSDLVLFFLTMSLATHRSTAKLLSVLAQVFTELAQKGFCLPKEFMEDSAGEGATEFHDYEGGGIGEGEGMKDVSDQIGNEEQVEDTFQKGQEKDKEDPDSKSDIKGEDNAIEMSEDFDGKMHDGELEEQEEDDEKSDSEGGDLDKHMGDLNGEEADKLDERLWGDDDEEEDEEEEDNKTEETGPGMDEEDSELVAKDDNLDSGNSNKDKSQQDK

SEQ ID NO: 2982 - protein, 113 aa, Homo sapiens
MGGCMAMHLAYRNHQDVAGVFALSSFLNKASAVYQALQKSNGVLPELFQCHGTADELVLHSWAEETNSMLKSLGVTTKFHSFPNVYHELSKTELDILKLWILTKLPGEMEKQK

SEQ ID NO: 2983 - protein, 207 aa, Homo sapiens
MHACTHAHTHTHAHTLSCKVEIWGQYLPTHTHTHTHTHAHCPVPPYTHAHAVCTSLHTHTHTHTLSLYWLISLYIHTHTHTHTHTHAVLYLPTHTHTHAVLTLAYLPIHTHTHTHTHTLSCTSLYTHTLSLHWLTCLYTHTHAHAVLYLPTHTHMLSLHWLPVLLTPFQEPPQAGHLGPPCRVQPWPHSDIGGGDAAQLRGCGSRLG

SEQ ID NO: 2984 - protein, 376 aa, Homo sapiens
MAMTPERQNAYISQQMSPFEAVQEQVTSKCSRIKASPPSSKHLMPPRTGLLQNNLSPGMIPLTRHQSCEGMGVISPTLGKRQGIFTSSPQCPILSHSGQTPLGRLDSVCQHMQSPKATPPEVPLPGFCPSSLGTQSLSPHQLRRPSVPRMPTAFNNAAWVTAAAAVTTAVSGKTPLSQVDNSVQQHSPSGQACLQRPSDWEAQVPAAMGTQVPLANNPSFSLLGSQSLRQSPVQGPVPVANTTKFLQQGMASFSPLSPIQGIEPPSYVAAAATAAAASAVAASQFPGPFDRTDIPPELPPADFLRQPQPPLNDLISSPDCNEVDFIEALLKGSCVSPDEDWVCNLRLIDDILEQHAAAQNATAQNSGQVTQDAGAL

SEQ ID NO: 2985 - protein, 359 aa, Homo sapiens [sequence omitted]

SEQ ID NO: 2986 - protein, 517 aa, Homo sapiens
MTVPGGFRSCTETDISSKIFINSTLTPPAGSERHYDATLLTLLVVGSYSLCIIPLLATFTGKKTGNAAVIKYEEKPPKPAFQNGSSGSFYLKPLVSRAHVHLMKTPPKGPSRKNLFTALNAVEKSRQKNPRSLCIQPQTAPDALPPEKTLELTQYKTKCENQSGFILQLKQLLACGNTKFEALTVVIQHLLSEREEALKQHKTLSQELVNLRGELVTASTTCEKLEKARNELQTVYEAFVQQHQAEKTERENRLKEFYTREYEKLRDTYIEEAEKYKMQLQEQFDNLNAAHETSKLEIEASHSEKLELLKKAYEASLSEIKKGHEIEKKSLEDLLSEKQESLEKQINDLKSENDALNEKLKSEEQKRRAREKANLKNPQIMYLEQELESLKAVLEIKNEKLHQQDIKLMKMEKLVDNNTALVDKLKRFQQENEELKARMDKHMAISRQLSTEQAVLQESLEKESKVNKRLSMENEELLWKLHNGDLCSPKRSPTSSAIPLQSPRNSGSFPSPSISPR

SEQ ID NO: 2987 - protein, 541 aa, Homo sapiens
MAQLERSAISGFSSKSRRNSFAYDVKREVYNEETFQQEHKRKASSSGNMNINITTFRHHVQCRCSWHRFLRCVLTIFPFLEWMCMYRLKDWLLGDLLAGISVGLVQVPQGLTLSLPARQLIPPLNIAYAAFCSSVIYVIFGSCHQMSIGSFFLVSALLINVLKVSPFNNGQLVMGSFVKNEFSAPSYLMGYNKSLSVVATTTFLTGIIQLIMGVLGLGFIATYLPESAMSAYLAAVALHIMLSQLTFIFGIMISFHAGPISFFYDIINYCVALPKANSTSILVFLTVVVALRINKCIRISFNQYPIEFPMELFLIIGFTVIANKISMATETSQTLIDMIPYSFLLPVTPDFSLLPKIILQAFSLSLVSSFLLIFLGKKIASLHNYSVNSNQDLIAIGLCNVVSSFFRSCVFTGAIARTIIQDKSGGRQQFASLVGAGVMLLLMVKMGHFFYTLPNAVLAGIILSNVIPYLETISNLPSLWRQDQYDCALWMMTFSSSIFLGLDIGLIISVVSAFFITTVRSHRYFVSGNRRLTRQGKPTLT

SEQ ID NO: 2988 - protein, 188 aa, Homo sapiens
MRTKPSQGFGVSPETPLSWPGGQRSTLQEPPRGRWATSPNKRHTRRPLARGGICGLPRAKAAAPGAQPVTGHLHASTQQTWPGGQCPWPLANRTLWNRRNLGSCPALWPASPWMLLPGRTEPLPVWPVPAFSQIQPRPLWIRSGHRQTKQAVASLAGSDLLQHKERMHCTARPLGTEGRCSAVSFCYR

SEQ ID NO: 2989 - protein, 607 aa, Homo sapiens [sequence omitted]

SEQ ID NO: 2990 - protein, 473 aa, Homo sapiens [sequence omitted]

SEQ ID NO: 2991 - protein, 419 aa, Homo sapiens
MLAAAFADSNSSSMNVSFAHLHFAGGYLPSDSQDWRTIIPALLVAVCLVGFVGNLCVIGILLHNAWKGKPSMIHSLILNLSLADLSLLLFSAPIRATAYSKSVWDLGWFVCKSSDWFIHTCMAAKSLTIVVVAKVCFMYASDPAKQVSIHNYTIWSVLVAIWTVASLLPLPEWFFSTIRHHEGVEMCLVDVPAVAEEFMSMFGKLYPLLAFGLPLFFASFYFWRAYDQCKKRGTKTQNLRNQIRSKQVTVMLLSIAIISALLWLPEWVAWLWVWHLKAAGPAPPQGFIALSQVLMFSISSANPLIFLVMSEEFREGLKGVWKWMITKKPPTVSESQETPAGNSEGLPDKVPSPESPASIPEKEKPSSPSSGKGKTEKAEIPILPDVEQFWHERDTVPSVQDNDPIPWEHEDQETGEGVK

SEQ ID NO: 2992 - protein, 189 aa, Homo sapiens [sequence omitted]

SEQ ID NO: 2993 - protein, 401 aa, Homo sapiens [sequence omitted]

SEQ ID NO: 2994 - protein, 215 aa, Homo sapiens
MHVCTGASKPLVSTPYHPTPTSLISAPSLGCAPLLSARGCLHVGVCMWVSVPSSVSCLHVGVCTLTCLVSAQACVGVPAGLFGGRPVILEVTHVFCGCLLLAPHSVEMGLHWPRLSPAHPPPSLPASKPRNSGFRGPSQVSTWQQCLQTPGWPICPPARLSDLSLPGCPCLHPSSPSHCRCLPTSHPWVPSQPLWPPQLGPLSSRLPHPVLLPPS

SEQ ID NO: 2995 - protein, 358 aa, Homo sapiens
MEGEGVRNFKELRAKFQNLDAPPLPGPIKFPAGVSPKGDIGGTQSTQILANGKPLSSNHKQRTPYCSSSESQPLQPQKIKLAQKSEIPKCSNSPGPLGKSTVCSATSSQKASLLLEVTQSNVEIITKEKVMVANSFRNKLWNWEKVSSQKSEMSSALLLANYGSKAIHLEGQKGMGLTPEEPRKKLETKGAQTLPSQKHVVAPKILHNVSEDPSFVISQHIRKSWENPPPERSPASSPCQPIYECELASQAPEKQPDVRHHHLPKTKPLPSIDSLGPPPPKPSRPPIVNLQAFQRQPAAVPKTQGEVTVEEGSLSPERLFNAEFEEPHNYEATISYLRHSGNSINLCTAKEIADRRCL

SEQ ID NO: 2996 - protein, 261 aa, Homo sapiens
MTIQRLKGSSHAVHEMKSLKQEKAPVSKTYKVPLNGQVYELLTVFMDWISDHHLSKVKHEESGMDGKKPQLKFASQRNDIQEKCVKLLPLMTEQLQWMPFVNIKLHEPFVKFIYWSLRQLDAGAQHSTMTSTLRRLGEDIFKGVVTKGIQDNSPQHSVENKPKTAAFFKSSNLPLRFLSTLIVLKTVTQADYLAQAFDSLCLDLKTEEGKTLFLEYQAVPVILSHLRISSKGLLSNVIDSLLQMTVESRVIRSSLNFLRFI

SEQ ID NO: 2997 - protein, 151 aa, Homo sapiens
MYGCYTPTAYSTRSAPEEDWVKLCKFGFPGNALHYSAPDLPTTPVGTRSSTHLAELMTAWAQRSAHCANTRTGIAPLPEPPYRAPFKELATPLTCKQPPTLKLIRTRVFHPKGLCCGRCSDPRRGREVPKATARGWGTPLLTLVLDFEGPN

SEQ ID NO: 2998 - protein, 146 aa, Homo sapiens
MPRGLRPGCPVRTGRLVTLESPLQVPAPPGNPQPPRRAWASPYRWGAAQCTPEGGRRGLGTPPVLRRRGLRRCCPPQRALGLGLRRSKCLPGAGRQGGAGAARCAAALGRRRRTGARGVRGARQAASALALRGRRDSRDRPWGPGV

SEQ ID NO: 2999 - protein, 350 aa, Homo sapiens [sequence omitted]

SEQ ID NO: 3000 - protein, 197 aa, Homo sapiens
MGGAGGQHGTDLHPALQTGTTARPCCWMVSSVWAPSWNTTQSTATGTALTEARGPACPGPLSLKPRLVPPTCCVMVWLPRPSLGWVWGWSGLAHASHLCLHLCCHPAPPSSSSPTSSSLCASVSCRKKWVEPERRLSEEGRGRAWGGSPTPHPKSQGLPPGSGRGRSWLCGVVAPLLLPCFSHLSCPSLVPTAVHHE

SEQ ID NO: 3001 - protein, 157 aa, Homo sapiens
MLSMICSRNLTAPNPMKDAGDMIEMQGFGPSLPAWHLEPLCSQGSSCLSCSSSSSPHATPSHCSCIPDRLPLRLLCESMKRQIVSRAFYGWLAHCRHLSTVRTHLSALVHHSVIPPDRPPGASAGLTKDVWSKYQKDKKVPTLGFQGHRSRGWGGQE

SEQ ID NO: 3002 - protein, 341 aa, Homo sapiens [sequence omitted]

SEQ ID NO: 3003 - protein, 135 aa, Homo sapiens [sequence omitted]

SEQ ID NO: 3004 - protein, 124 aa, Homo sapiens [sequence omitted]

SEQ ID NO: 3005 - protein, 125 aa, Homo sapiens
MPANGETVTLPTSPSIPVGISLGLLKREMAQGLLPEAKKPRLLHGTLIMKDSVSARTVSGGGRAAAALTDLSLPHRTSGWCPQSKPSKSWVWLSTSCASPAACTCMTHARSRRRHCASTATSRAS

SEQ ID NO: 3006 - protein, 311 aa, Homo sapiens [sequence omitted]

SEQ ID NO: 3007 - protein, 250 aa, Homo sapiens
MGQGTGKLPPPHLISDLPPQCPMCDPAIFSKLNSVTRATGLAPSPSKDSEGASFSHLLIIFHFSRQPTQKAWTRWWRCWGSYTEALFSVCSLPGQIRKLRHRKVTQDYRGQHREQWNLHLTPGRRNLHDHSTPPQGTGRENNGSSRTKVTFPRVSCCLDLAAVSVLPRRGISMSSGQWQRGRGAPLQCAGWSAGSCQCEDLQQLVYPWSCHQLPEFGAAGATLVVLPCRGSSCLLVSESQLWGCNLKPKA

SEQ ID NO: 3008 - protein, 287 aa, Homo sapiens
MGKGLYWACWGAVPLPSWVHHGWRACGWVALAGILRACRLPSALQPSPAPLFFKGVLLLGEPVRWETSLQLIMDVLLSNGSPGAGLATPPYPHLPVLASNMDLLWMAEAKMPRFGHGTFLLCLETIYQKVTGKELRYEGLMGKPSILTYQYAEDLIRRQAERRGWAAPIRKLYAVGDNPMSDVYGANLFHQYLQKATHDGAPELGAGGTRQQQPSASQSCISILVCTGVYNPRNPQSTEPVLGGGEPPFHGHRDLCFSPGLMEASHVVNDVNEAVQLVFRKEGWALE

SEQ ID NO: 3009 - protein, 115 aa, Homo sapiens [sequence omitted]

SEQ ID NO: 3010 - protein, 528 aa, Homo sapiens
MGDAPSPEEKLHLITRNLQEVLGEEKLKEILKERELKIYWGTATTGKPHVAYFVPMSKIADFLKAGCEVTILFADLHAYLDNMKAPWELLELRVSYYENVIKAMLESIGVPLEKLKFIKGTDYQLSKEYTLDVYRLSSVVTQHDSKKAGAEVVKQVEHPLLSGLLYPGLQALDEEYLKVDAQFGGIDQRKIFTFAEKYLPALGYSKRVHLMNPMVPGLTGSKMSSSEEESKIDLLDRKEDVKKKLKKAFCEPGNVENNGVLSFIKHVLFPLKSEFVILRDEKWGGNKTYTAYVDLEKDFAAEVVHPGDLKNSVEVALNKLLDPIREKFNTPALKKLASAAYPDPSKQKPMAKGPAKNSEPEEVIPSRLDIRVGKIITVEKHPDADSLYVEKIDVGEAEPRTVVSGLVQFVPKEELQDRLVVVLCNLKPQKMRGVESQGMLLCASIEGINRQVEPLDPPAGSAPGEHVFVKGYEKGQPDEELKPKKKVFEKLQADFKISEECIAQWKQTNFMTKLGSISCKSLKGGNIS

SEQ ID NO: 3011 - protein, 111 aa, Homo sapiens [sequence omitted]

SEQ ID NO: 3012 - protein, 118 aa, Homo sapiens [sequence omitted]

SEQ ID NO: 3013 - protein, 153 aa, Homo sapiens [sequence omitted]

SEQ ID NO: 3014 - protein, 329 aa, Homo sapiens [sequence omitted]

SEQ ID NO: 3015 - protein, 169 aa, Homo sapiens
MGSSKGLWKEKPSAHTSECFSTTACPVACILLVWNSQTPAGLQSLCTGRHPSLSARAQWAGPRASREEGTFWTEPVGQERRLIRSGSSQNESQEDQGADLISHEGLKADNRRESSTWANEVEDRRPQCTSALNLTPSHLHPPHPLTTFFRNVIGIKIPPGLVAMGGTVA

SEQ ID NO: 3016 - protein, 155 aa, Homo sapiens [sequence omitted]

SEQ ID NO: 3017 - protein, 140 aa, Homo sapiens
MKVTGTPPAEFVQRLQSDEAKNYMKGLPELEKKDFASILTNASPLAVNLLEKMLVLDAEQRVTAGEALAHPYFESLHDTEDEPQVQKYDDSFDDVDRTLDEWKREWGAPGTACVDPSGGLWAGPVWTRELGALGRACVNP

SEQ ID NO: 3018 - protein, 276 aa, Homo sapiens
MLARRDLGLVPHGVSGVSIAASSTPQGQAVCSPSVAAPSTLLLLRTHLLGAASLQGCGVLHILPIFLFSKGCRRDAQCACTVGPSASPRSGRGPGRGGGRRPRLGAARSGCPGAAAAGGPAVLHPWRRAGGRVRGASPPQGPQTARGFPLPSRWSSSPIPGCISIYPSPISFAHPGSLAPLGSPFPSPGPPSRSRLLCPGLRRGLTPGRWFRPDLGSLVTPRLLPLPNSGEPGIKPCAFLFFLLRAESTLHVCQGISSESERRTRSFFFFPRSCLL

SEQ ID NO: 3019 - protein, 520 aa, Homo sapiens
MSPPKDPSPSLPLPSSSSHSSSPPSSSSTSVSGNAPDGSSPPQMTASEPLSQVSRGHPSPPTPNFRRRAIAQGAPREIPLYLPHHPKPEWAEYCLVSPGEDGLSDPAEMTSDECQPAEAPLGDIGSNHRDPHPIWGKDRSWTGQELSPLAGEDREKGSTGARKEEEGGPVLVKEKLGLKKLVLTQEQKTMLLDWNDSIPESVHLKAGERISQKSAENGRGGRVLKPVRPLLLPRAAGEPLPTQRGAQEKMGTPAEQAQGERNVPPPKSPLRLIANAIRRSLEPLLSNSEGGKKAWAKQESKTLPTQACTRSFGLRKTNSNKDGDQHSPGRNQSSAFSPPDPALRTHSLPNRPSKVFPALRSPPCSKIEDVPTLLEKVSLQENFPDASKPPKKRISLFSSLRLKDKSFESFLQESRQRKDIRDLFGSPKRKVLPEDSAQALEKLLQPFKSTSLRQAAPPPPPPPPPPPPPPPTAGGADSKNFPLRAQVTEASSSASSTSSSSADEEFDPQLSLQLKEKKTL

SEQ ID NO: 3020 - protein, 110 aa, Homo sapiens [sequence omitted]

SEQ ID NO: 3021 - protein, 111 aa, Homo sapiens [sequence omitted]

SEQ ID NO: 3022 - protein, 723 aa, Homo sapiens [sequence omitted]

SEQ ID NO: 3023 - protein, 164 aa, Homo sapiens
MGVSVDVHQVYKYPFEQVVASFLRKYPNPMDKNVISVKIMEEKRDESTGVIYRKRIAICQNVVPEILRKVSILKVPNIQLEEESWLNPRERNMAIRSHCLTWTQYASMKEESVFRESMENPNWTEFIQRGRISITGVGFLNCVLETFASTFLRQGAQKVTIFLL

SEQ ID NO: 3024 - protein, 735 aa, Homo sapiens
MAEPLLRKTFSRLRGREKLPRKKSDAKERGHPAQRPEPSPPEPEPQAPEGSQAGAEGPSSPEASRSPARGAYLQSLEPSSRRWVLGGAKPAEDTSLGPGVPGTGEPAGEIWYNPIPEEDPRPPAPEPPGPQPGSAESEGLAPQGAAPASPPTKASRTKSPGPARRLSIKMKKLPELRRRLSLRGPRAGRERERAAPAGSVISRYHLDSSVGGPGPAAGPGGTRSPRAGYLSDGDSPERPAGPPSPTSFRPYEVGPAARAPPAALWGRLSLHLYGLGGLRPAPGATPRDLCCLLQVDGEARARTGPLRGGPDFLRLDHTFHLELEAARLLRALVLAWDPGVRRHRPCAQGTVLLPTVFRGCQAQQLAVRLEPQGLLYAKLTLSEQQEAPATAEPRVFGLPLPLLVERERPPGQVPLIIQKCVGQIERRGLRVVGLYRLCGSAAVKKELRDAFERDSAAVCLSEDLYPDINVITGILKDYLRELPTPLITQPLYKVVLEAMARDPPNRVPPTTEGTRGLLSCLPDVERATLTLLLDHLRLVSSFHAYNRMTPQNLAVCFGPVLLPARQAPTRPRARSSGPGLASAVDFKHHIEVLHYLLQSWPDPRLPRQSPDVAPYLRPKRQPPLHLPLADPEVVTRPRGRGGPESPPSNRYAGDWSVCGRDFLPCGRDFLSGPDYDHVTGSDSEDEDEEVGEPRVTGDFEDDFDAPFNPHLNLKDFDALILDLERELSKQINVCL

SEQ ID NO: 3025 - protein, 124 aa, Homo sapiens [sequence omitted]

SEQ ID NO: 3026 - protein, 276 aa, Homo sapiens
MSFEGGDGAGPAMLATGTARMASGRPEELWEAVVGAAERFRARTGTELVLLTAAPPPPPRPGPCAYAAHGRGALAEAARRCLHDIALAHRAATAARPPAPPPAPQPPSPTPSPPRPTLAREDNEEDEDEPTETETSGEQLGISDNGGLFVMDEDATLQDLPPFCESDPESTDDGSLSEETPAGPPTCSVPPASALPTQQYAKSLPVSVPVWGFKEKRTEARSSDEENGPPSSPDLDRIAASMRALVLREAEDTQVFGDLPRPRLNTSDFQKLKRKY

SEQ ID NO: 3027 - protein, 100 aa, Homo sapiens [sequence omitted]

SEQ ID NO: 3028 - protein, 136 aa, Homo sapiens
MDQLLDTIRSLTIGCSSCSSLMEHFEDTREKNEALLGELFSSPHLQMLLNPECDPWPLDMQPLLNKQSDDWQWASASAKSEEEEKLAELARQLQESAAKLHALRTESTTTSWASAASAQALTSTRAAPSSRPRTRI

SEQ ID NO: 3029 - protein, 617 aa, Homo sapiens
MVPVENTEGPSLLNQKGTAVETEGSGSRHPPWARGCGMFTFLSSVTAAVSGLLVGYELGIISGALLQIKTLLALSCHEQEMVVSSLVIGALLASLTGGVLIDRYGRRTAIILSSCLLGLGSLVLILSLSYTVLIVGRIAIGVSISLSSIATCVYIAEIAPQHRRGLLVSLNELMIVIGILSAYISNYAFANVFHGWKYMFGLVIPLGVLQAIAMYFLPPSPRFLVMKGQEGAASKVLGRLRALSDTTEELTVIKSSLKDEYQYSFWDLFRSKDNMRTRIMIGLTLVFFVQITGQPNILFYASTVLKSVGFQSNEAASLASTGVGVVKVISTIPATLLVDHVGSKTFLCIGSSVMAASLVTMGIVNLNIHMNFTHICRSHNSINQSLDESVIYGPGNLSTNNNTLRDHFKGISSHSRSSLMPLRNDVDKRGETTSASLLNAGLSHTEYQIVTDPGDVPAFLKWLSLASLLVYVAAFSIGLGPMPWLVLSEIFPGGIRGRAMALTSSMNWGINLLISLTFLTVTDLIGLPWVCFIYTIMSLASLLFVVMFIPETKGCSLEQISMELAKVNYVKNNICFMSHHQEELVPKQPQKRKPQEQLLECNKLCGRGQSRQLSPET

SEQ ID NO: 3030 - protein, 895 aa, Homo sapiens [sequence omitted]

SEQ ID NO: 3031 - protein, 160 aa, Homo sapiens
MLSHLLAYRRSRDFIDVCEVSENVPAFTPAFSHWHLLLTWAIWPCMVLGESSLTLQMLSSDLAGKGDQECRAPAEDSPKPKSQRVGAPTTSACMPFPGSPQADSQHPLPKDRAVPDQHPTKSSVRPVFGGAGFQEDSGGGVELMAGGSGPLRKLCHWAWG

SEQ ID NO: 3032 - protein, 570 aa, Homo sapiens
MAGLTAAAPRPGVLLLLLSILHPSRPGGVPGAIPGGVPGGVFYPGAGLGALGGGALGPGGKPLKPVPGGLAGAGLGAGVGGAFAGIPGVGPFGGPQPGVPLGYPIKAPKLPGYGPGGVAGAAGKAGYPTGTGVGPQAAAAAAAKAAAKFGAGAAGVLPGVGGAGVPGVPGAIPGIGGIAGVGTPAAAAAAAAAAKAAKYGAAAGLVPGGPGFGPGVVGVPGAGVPGVGVPGAGIPVVPGAGIPGAAVPGVVSPEAAAKAAAKAAKYGARPGVGVGGIPTYGVGAGGFPGFGVGVGGIPGVAGVPSVGGVPGVGGVPGVGISPEAQAAAAAKAAKYGLVPGVGVAPGVGVAPGVGVAPGVGLAPGVGVAPGVGVAPGVGVAPGIGPGGIAAAAKSAAKVAAKAQLRAAAGLGAGIPGLGVGVGVPGLGVGAGVPGLGVGAGVPGFGAVPGALAAAKAAKYGAAVPGVLGGLGALGGVGIPGGVVGAGPAAAAAAAKAAAKAAQFGLVGAAGLGGLGVGGLGVPGVGGLGGIPPAAAAKAAKYGVAARPGFGLSPIFPGGACLGKACGRKRK

SEQ ID NO: 3033 - protein, 493 aa, Homo sapiens
MVADPPRDSKGLAAAEPTANGGLALASIEDQGAAAGGYCGSRDQVRRCLRANLLVLLTVVVCSLIGGAASLDPGALGRLGAWALLFFLVTTLLASALGVGLALALQPGAASAAINASVGAAGSAENAPSKEVLDSFLDLARNIFPSNLVSAAFRSYSTTYEERNITGTRVKVPVGQEVEGMNILGLVVFAIVFGVALRKLGPEGELLIRFFNSFNEATMVLVSWIMWYAPVGIMFLVAGKIVEMEDVGLLFARLGKYILCCLLGHAIHGLLVLPLIYFLFTRKNPYRFLWGIVTPLATAFGTSSSSATLPLMMKCVEENNGVAKHISRFILPIGATVNMDGAALFQCVAAVFIAQLSQQSLDFVKIITILVTATASSVGAAGIPAGGVLTLAIILEAVNLPVDHISLILAVDWLVDRSCTVLNVEGDALGAGLLQNYVDRTESRSTEPELIQVKSELPLDPLPVPTEEGNPLLKHYRGPAGDATVASEKESVM

SEQ ID NO: 3034 - protein, 675 aa, Homo sapiens
MRPLRPRAALLALLASLLAAPPVAPAEAPHLVHVDAARALWPLRRFWRSTGFWGSTGRGLSYNFTHLDGYLDLLRENQLLPGFELMGSASGHFTDFEDKQQVFEWKDLVSSLARRYIGRYGLAHVSKWNFETWNEPDHHDFDNVSMTMQGFLNYYDACSEGLRAASPALRLGGPGDSFHTPPRSPLSWGLLRHCHDGTNFFTGEAGVRLDYISLHRKVRPAPPSAPVFCALSRCAPGRADPGGAEAAPPAGCAQLHLHPGAGEGRRAADPAALPQVRGHPHLQRRGGPAGGLVPATAVEGGRDLRGHGGEGGPAQRPARPPATFLPRRDRRAVAAPPGPSCPGHPQVIAQHQNLLLANTTSAFPYALLSNDNAFLSYHPHPFAQRTLTARFQVNNTRPPHVQLLRKPVLTAMGLLALLDEEQLWAEVSQAGTVLDSNHTVGVLASAHRPQGPADAWRAAVLIYASDDTRAHPNRSVAVTLRLRGVPPGPGLVYVTRYLDNGLCSPDGEWRRLGRPVFPTAEQFRRMRAAEDPVAAAPRPLPAGGRLTLRPALRLPSLLLVHVCARPEKPPGQVTRLRALPLTQGQLVLVWSDEHVGSKCLWTYEIQFSQDGKAYTPVSRKPSTFNLFVFSPDTGAVSGSYRVRALDYWARPGPFSDPVPYLEVPVPRGPPSPGNP

SEQ ID NO: 3035 - protein, 334 aa, Homo sapiens
MHSSSFRFVNIWPALFFAPRSVVRRAASLLSKVVDSLAPSITNVLVQGKQVTLGAFGHEEEVISNPLSPRVIQNIIYYKCNTHDEREAVIQQELVIHIGWIISNNPELFSGMLKIRIGWIIHAMEYELQIRGGDKPALDLYQLSPSEVKQLLLDILQPQQNGRCWLNRRQIDGSLNRTPTGFYDRVWQILERTPNGIIVAGKHLPQQPTLSDMTMYEMNFSLLVEDTLGNIDQPQYRQIVVELLMVVSIVLERNPELEFQDKVDLDRLVKEAFNEFQKDQSRLKEIEKQDDMTSFYNTPPLGKRGTCSYLTKAVMNLLLEGEVKPNNDDPCLIS

SEQ ID NO: 3036 - protein, 578 aa, Homo sapiens [sequence omitted]

SEQ ID NO: 3037 - protein, 409 aa, Homo sapiens
MQVTLKTLQQQTFKIDIDPEETVKALKEKIESEKGKDAFPVAGQKLIYAGKILNDDTALKEYKIDEKNFVVVMVTKPKAVSTPAPATTQQSAPASTTAVTSSTTTTVAQAPTPVPALAPTSTPASITPASATASSEPAPASAAKQEKPAEKPAETPVATSPTATDSTSGDSSRSNLFEDATSALVTGQSYENMVTEIMSMGYEREQVIAALRASFNNPDRAVEYLLMGIPGDRESQAVVDPPQAASTGAPQSSAVAAAAATTTATTTTTSSGGHPLEFLRNQPQFQQMRQIIQQNPSLLPALLQQIGRENPQLLQQISQHQEHFIQMLNEPVQEAGGQGGGGGGGSGGIAEAGSGHMNYIQVTPQEKEAIERLKALGFPEGLVIQAYFACEKNENLAANFLLQQNFDED

SEQ ID NO: 3038 - protein, 521 aa, Homo sapiens [sequence omitted]

SEQ ID NO: 3039 - protein, 228 aa, Homo sapiens [sequence omitted]

SEQ ID NO: 3040 - protein, 544 aa, Homo sapiens
MPPNLGNAGLLGRMLDEKTPPSPSGQPEEPGMVRLVCGHHNWIAVAYTQFLVCYRLKEASGWQLVFSSPRLDWPIERLALTARVHGGALGEHDKMVAAATGSEILLWALQAEGGGSEIGVFHLGVPVEALFFVGNQLIATSHTGRIGVWNAVTKHWQVQEVQPITSYDAAGSFLLLGCNNGSIYYVDVQKFPLRMKDNDLLVSELYRDPAEDGVTALSVYLTPKTSDSGNWIEIAYGTSSGGVRVIVQHPETVGSGPQLFQTFTVHRSPVTKIMLSEKHLISVCADNNHVRTWSVTRFRGMISTQPGSTPLASFKILALESADGHGGCSAGNDIGPYGERDDQQVFIQKVVPSASQLFVRLSSTGQRVCSVRSVDGSPTTAFTVLECEGSRRLGSRPRRYLLTGQANGSLAMWDLTTAMDGLGQAPAGGLTEQELMEQLEHCELAPPAPSAPSWGCLPSPSPRISLTSLHSASSNTSLSGHRGSPSPPQAEARRRGGGSFVERCQELVRSGPDLRRPPTPAPWPSSGLGTPLTPPKMKLNETSF

SEQ ID NO: 3041 - protein, 106 aa, Homo sapiens
MDFSAPELQLKPTRAATHRTTSFPPRRMQWGWLFGSLHSCHWLGRQPLLSLKAVVSFRVFSWKSRRNSSLIRRWGPGGGSGIRGQAAHRIRASLCPPDAPWGESSV

SEQ ID NO: 3042 - protein, 574 aa, Homo sapiens
MVGERHAGDLMVPLGPRLQAYPEELIRQRPGHDGHPEYLIRWSVLKCGEVGKVGVEEGKAEHILMWLSAPEVYANCPGLLGERALSKGLQHEPAGVSGSFPRDPGGLDEVAMGEMEADVQALVRRAARQLAESGTPSLTAAVLHTIHVLSAYASIGPLTGVFRETGALDLLMHMLCNPEPQIRRSAGKMLQALAAHDAGSRAHVLLSLSQQDGIEQHMDFDSRYTLLELFAETTSSEEHCMAFEGIHLPQIPGKLLFSLVKRYLCVTSLLDQLNSSPELGAGDQSSPCATREKSRGQRELEFSMAVGNLISELVRSMGWARNLSEQGMSPPRPTRSIFQPYISGPSLLLPTIVTTPRRQGWVFRQRSEFSSRSGYGEYVQQTLQPGMRVRMLDDYEEISAGDEGEFRQSNNGIPPVQTLGEKALGEISVSVEMAESLLQVLSSRFEGSTLNDLLNSQIYTKYGLLSNEPSSSSTSRNHSCTPDPEEESKSEASFSEEETESLKAKAEAPKTEAEPTKTRTETPMAQSDSQLFNQLLVTEGMTLPTEMKEAASGESGSGRKQLEQVLGSLSRRNG

SEQ ID NO: 3043 - protein, 177 aa, Homo sapiens [sequence omitted]

SEQ ID NO: 3044 - protein, 100 aa, Homo sapiens
MSIDQRKKMLKNLRNTNYDVFERICWGLGIEYTFPPLYYRRAHRRFVTKKALCIRVFQETQKLKKRRRALKAAAAAQKQAKRRNPDSPAKAIPKTLKDSQ

SEQ ID NO: 3045 - protein, 109 aa, Homo sapiens
MGIAMGPGATRWTQGPHSTTVPCDAALMTSRHQSWTPPQVRSWASYGSGPLAHDIHTVWVSSSPPHPTDQVQFEKCGKRVDRLDQRRSKLRVAGGHPGNSPWTVSLGNR

SEQ ID NO: 3046 - protein, 491 aa, Homo sapiens
MMSEHDLADVVQIAVEDLSPDHPVVLENHVVTDEDEPALKRQRLEINCQDPSIKSFLYSINQTICLRLDSIEAKLQALEATCKSLEEKLDLVTNKQHSPIQVPMVAGSPLGATQTCNKVRCAVPGRRQNTIVVKVPGQEDSHHEDGESGSEASDSVSSCGQAGSQSIGSNVTLITLNSEEDYPNGTWLGDENNPEMRVRCAIIPSDMLHISTNCRTAEKMALTLLDYLFHREVQAVSNLSGQGKHGKKQLDPLTIYGIRCHLFYKFGITESDWYRIKQSIDSKCRTAWRRKQRGQSLAVKSFSRRTPNSSSYCPSEPMMSTPPPASELPQPQPQPQALHYALANAQQVQIHQIGEDGQVQVIPQGHLHIAQVPQGEQVQITQDSEGNLQIHHVGQDGQLLEATRIPCLLAPSVFKASSGQVLQGAQLIAVASSDPAAAGVDGSPLQGSDIQVQYVQLAPVSDHTAGAQTAEALQPTLQPEMQLEHGAIQIQ

SEQ ID NO: 3047 - protein, 149 aa, Homo sapiens
MAMAHAGLCGWRGEVSLDSREKPWGNPKGLRKTGIGVRHEGRESLGKTGRAVRSPEGSCGCSAAGRPRLAPPRRWASPPGAHPRAAAFLHAAQGSSMPGAGMRQRFCSLLAILASPNERALKMKLLINSRVRNSGLCGKGRALHFVSNR

SEQ ID NO: 3048 - protein, 232 aa, Homo sapiens
MGLMLTIPLSNRSFMPNLVPPKIPDGERVDFDDIHGKRTEKDLNELQALIEAHFENRKKEEEELVSLKDRIERRRAERAEQQRIRNEREKERQNRLAEERARREEEENRRKAEDEARKKKALSNMMHFGGYIQKQAQTERKSGKRQTEREKKKKILAERRKVLAIDHLNEDQLREKAKELWQSIYNLEAEKFDLQEKFKQQKYEINVLRNRINDNQKVSKTRGKAKVIGRWK

SEQ ID NO: 3049 - protein, 496 aa, Homo sapiens [sequence omitted]

SEQ ID NO: 3050 - protein, 546 aa, Homo sapiens [sequence omitted]

SEQ ID NO: 3051 - protein, 569 aa, Homo sapiens [sequence omitted]

SEQ ID NO: 3052 - protein, 307 aa, Homo sapiens [sequence omitted]

SEQ ID NO: 3053 - protein, 422 aa, Homo sapiens
MASKFTDGDLNNDGPHDEGLRSSQQNPKVQKYISFSLPLSEATAHIYPGDSAVANKQPSPQLSSEDSDSDYELCPEITLTYTEEFSDDDLEYLECSDVMTDYSNAVWQRNLLGTEHVFLLESDDEEMEFGEHCLGGCEHFLSGMGCGSRVSGDAGPMVATAGFCGHHSQPQEVGVRSSRVSKHGPSSPQTGMTLILGPHQDGTSSVTEQGRYKLPTAPEAAENDYPGIQGETRDSHQAREEFASDNLLNMDESVRETEMKLLSGESENSGMSQCWETAADKRVGGKDLWSKRGSRKSARVRQPGMKGNPKKPNANLRESTTEGTLHLCSAKESAEPPLTQSDKRETSHTTAAATGRSSHADARECAISTQAEQEAKTLQTSTDSVSKEGNTNCKGEGMQVNTLFETSQVPDWSDPPQVRLFF

SEQ ID NO: 3054 - protein, 184 aa, Homo sapiens [sequence omitted]

SEQ ID NO: 3055 - protein, 508 aa, Homo sapiens [sequence omitted]

SEQ ID NO: 3056 - protein, 716 aa, Homo sapiens
METTGDQGIEGMAYMDENRNITFTCPRTPSELINKSSPLEVLGSAACEKLPTPTPQVVKEGDSFPDTLAKNGQEIAPAQISKSLMVDNYTKDGVPGQERPKGPSAVVPSTSTGGVALPITTAIETVNIHGDHSLKNKAELADSMKNEAGIDEGHVIGESESVHSGASKHSVEKVTELAKGHLLPGVPVEDQSLPGEARALEGYADRGNFPAHPVNEEKETKEGSVAVQIPDLLEDKAQKLSFCEDQNAQDRNSKGSDSLNKKVDLTLLSPKSENDKLKEISLACKITELESVSLPTPEIQSDFLHSKVEAPPSEVADTLVIMTASKGVRLPEPKDKILETPQKMTEKSESKTPGEGKKEDKSRMAEPMKGYMRPTKSRGLTPLLPKSTIQEQERHKQLKSAGIARPEEGRPVVSGTGNDITTPPNKELPPSPEKKTKPLATTQPAKTSTSKAKTQPTSLPKQPAPTTIGGLNKKPMSLASGLVPAAPPKRPAVASARPSILPSKDVKPKPIADAKAPEKRASPSKPASAPASRSGSKSTQTVAKTTTAAAVASTGPSSRSPSTLLPKKPTAIKTEGKPAEVKKMTAKSVPADLSRPKSTSTSSMKKTTTLSGTAPAAGVVPSRVKATPMPSRPSTTPFIDKKPTSAKPSSTTPRLSRLATNTSAPDLKNVRSKAKVEKKTEAAATTRKPESNAVTKTAGPIASAQKQPAGKVQIVS

SEQ ID NO: 3057 - protein, 743 aa, Homo sapiens
MLHFNRCHHLKKITQKCFSSIHVKTDKHAQRFLSRTFALAELRKSWYSTHSLVGDKNIILMGPPGAGKTTVGRIIGQKLGCCVIDVDDDILEKTWNMSVSEKLQDVGNEQFLEEEGKAVLNFSASGSVISLTGSNPMHDASMWHLKKNGIIVYLDVPLLDLICRLKLMKTDRIVGQNSGTSMKDLLKFRRQYYKKWYDARVFCESGASPEEVADKVLNAIKRYQDVDSETFISTRHVWPEDCEQKVSAKFFSEAVIEGLASDGGLFVPAKEFPKLSCGEWKSLVGATYVERAQILLERCIHPADIPAARLGEMIETAYGENFACSKIAPVRHLSGNQFILELFHGPTGSFKDLSLQLMPHIFAHCIPPSCNYMILVATSGDTGSAVLNGFSRLNKNDKQRIAVVAFFPENGVSDFQKAQIIGSQRENGWAVGVESDFDFCQTAIKRIFNDSDFTGFLTVEYGTILSSANSINWGRLLPQVVYHASAYLDLVSQGFISFGSPVDVCIPTGNFGNILAAVYAKMMGIPIRKFICASNQNHVLTDFIKTGHYDLRERKLAQTFSPSIDILKSSNLERHLHLMANKDGQLMTELFNRLESQHHFQIEKALVEKLQQDFVADWCSEGECLAAINSTYNTSGYILDPHTAVAKVVADRVQDKTCPVIISSTAHYSKFAPAIMQALKIKEINETSSSQLYLLGSYNALPPLHEALLERTKQQEKMEYQVCAADMNVLKSHVEQLVQNQFI

SEQ ID NO: 3058 - protein, 118 aa, Homo sapiens
MPGVFAKRPARVGDGKREGKKSRRRCGQKGRRERAQHPFQGFFLELAPTSKRGEASLAPLWQHSDAILLQLRVRTISPHARHVQDYTETSWPGHGPNPRFFILYEGRSFHSETTNLQN

SEQ ID NO: 3059 - protein, 275 aa, Homo sapiens [sequence omitted]

SEQ ID NO: 3060 - protein, 213 aa, Homo sapiens [sequence omitted]

SEQ ID NO: 3061 - protein, 190 aa, Homo sapiens
MISFSGLERMLKTYSSTSSFSDAKSQKDTAALMDENNLKLDLLEANSYKLSSMLAELEQRPQPSHPCSNSIFRWREKEHTHSYVKISRPFLMKRLENIVSKASSGGQSNPGSSTPAPGAAQLSSRLCKALYSFQARQDGELNLEKGDIVIIHEKKEEGWWFGSLNGKKGHFSAAYVEELPSNAGNTATKA

SEQ ID NO: 3062 - protein, 574 aa, Homo sapiens
MVARGEIARFWSLESLHLVSSDGGTEPSALVDDNGSEEDFSYEDLCQASPRYLQPGGEQLAINELISDGNVVCAEALWDHVTMDDQELGFKAGDVIQVLEASNKDWWWGRSEDKEAWFPASFVRLRVNQEELSENSSSTPSEEQDEEASQSRHRHCENKQQMRTNVIREIMDTERVYIKHLRDICEGYIRQCRKHTGMFTVAQLATIFGNIEDIYKFQRKFLKDLEKQYNKEEPHLSEIGSCFLQNQEGFAIYSEYCNNHPGACLELANLMKQGKYRHFFEACRLLQQMIDIAIDGFLLTPVQKICKYPLQLAELLKYTTQEHGDYSNIKAAYEAMKNVACLINERKRKLESIDKIARWQVSIVGWEGLDILDRSSELIHSGELTKITKQGKSQQRTFFLFDHQLVSCKKDLLRRDMLYYKGRLDMDEMELVDLGDGRDKDCNLSVKNAFKLVSRTTDEVYLFCAKKQEDKARWLQACADERRRVQEDKEMGMEISENQKKLAMLNAQKAGHGKSKGYNRCPVAPPHQGLHPIHQRHITMPTSVPQQQVFGLAEPKRKSSLFWHTFNRLTPFRK

SEQ ID NO: 3063 - protein, 703 aa, Homo sapiens [sequence omitted]

SEQ ID NO: 3064 - protein, 129 aa, Homo sapiens
MMMERDVFILFYFFRQSLALSPSLECNGTISAHCNLRLPGSSNSPASASHVAGITGTHHHARLIFLFLVEMGFHHVGQAGLELLTSGDLPALASQSAGITGVSHRARPLFYFLEMVLLCHPGWSAVMQS

SEQ ID NO: 3065 - protein, 274 aa, Homo sapiens
MCMGGLHAGMCVSLCVCVCACVCVHVGICMHACVCLCMCMCVCACGNLHAFLCVFVSVYTCMGVFECVHLCVHLFVCICVGASAWILVCICVCAHVCTCVHSFVYVCGCVHVGMRVYLCEHVRMCVSLCACLCVCIHVRVCIYACILVCALVCMHICLEDMALPQGLGTLPCLPCPALPCPEVWGTWPCSGVWGTLPWAPACPGPLPALAAHLALGPAEWNLQPLHGLDHGPHGHEDVLVDQGPEALALLLRVAGAVDDPHLLDEDETRRTREV

SEQ ID NO: 3066 - protein, 238 aa, Homo sapiens
MAFHHVGQAGLELLTSGDPPTSASQSAGLQSCATASRLLFFFLLSSVFFYPTSLPLSSLLPPFPFSSLLPPSCFSPSFPLPSFLFLPFPVCLPPLFLSCLPVSFALFLPFSRPSLPAFLFTSFPSHCFLAFPAFPCLSLSFLPFPASLFPAFPHLSLSCLSLSLPFFPSPPTLPPSSLLFFPLLSLCLSFFFPSLFLFSPCVFLALVFPFSPLCTEKMTVPGCGWAGVTRPRERGHPG

SEQ ID NO: 3067 - protein, 233 aa, Homo sapiens
MNEGTVGGKPRENFGYSDEGSGECGERQARARCSRLFPVPASRLAHASLPPEIVQRRRDPGGALRMPFRKLLLPRAWGLWCSGMGCDAGLQQGLRPLHVCHKHFLVLRSRPGCSLPRAVLSQHPQEGRPQAEKPAGAYCPEWASNPPLLGFWGQGPVHKPLQVPPSGLPSPQGWPRERLSEDCLLHPGGSAPRAGPPQGQGVPQAGPQGLSRGTAGGSPLGREENLAPQLAAS

SEQ ID NO: 3068 - protein, 104 aa, Homo sapiens
MLQLIRAILKVPEDPTQCFLLFANQTEKDIILREDLEELQARYPNRFKLWFTLDHPPKGILPISGHPTIPSSSKSKPCPFVNSGFIEINLASHCQLGSLSAQTQ

SEQ ID NO: 3069 - protein, 163 aa, Homo sapiens
MVSNSISYHLPVSLQDPCSQIPSRSICLCHSRTHGLKFCFLPSACAIAGPMVTNSISYHLPVSLQDPCSQIPSRSICLCHSRTHGHKFHLLPSACAIAGPMVTNSISYHLPVSLQDPCSQIPSRTICLCHSRTHGHKFHLLPSACVIAGSMVTNSISYHLPVP

SEQ ID NO: 3070 - protein, 116 aa, Homo sapiens
MNSCQEHCLHKGRSLPDLRTQQNFYFVKNLIFSLHHSFQVNIQQSAFQFREMFTVVWFSLFLGTRLPHLEHITSAKLSIPKQYRFLLLSRSSSGCGRQTFQNCLPSFPPPEMHAFV

SEQ ID NO: 3071 - protein, 282 aa, Homo sapiens
MGRRLHSAHDPGLSKTSTAEMEHGLHEARTVRTSQDSSNVRKPLETGHRCSSSSSLPVIHDPSVFLLGPQLYLPQPQFLSPDVLMPTMAGEPNRLPGTSRSVQQFLAMCDRGETSQGAKYTGRTLNYQSLPHRSRTDNSWAPWSETNQHIGTRFLTTPGCNPQLTYTATLPERSKGLQVPHTQSWSDLFHSPSHPPIVHPVYPPSSSLHVPLRSAWNSDPVPGSRTPGPRRVDMPPDDDWRQSSYASHSGHRRTVGEGFLFVLSDAPRREQIRARVLQHSQW

SEQ ID NO: 3072 - protein, 105 aa, Homo sapiens
MDGLPSHRPVIELCIPSSLDPTLAPPGCHVVSLFTQYTPYTLAGGKAWDEQERDAYADRVFDCIEVYAPGFKDSVVGRDILTPPDLERIFGLPGGKISWKEKNIC

SEQ ID NO: 3073 - protein, 106 aa, Homo sapiens
MKRPSPGLPLSPFPSPLHSWSTSWKNTSWGAAFPSKRWGLHSQPAIRKLNRSSPRSRVSTGRARVDQLCSSGTNPPYMPGLEAFGFVDAKSGWSRLLHPDSPASPF

SEQ ID NO: 3074 - protein, 105 aa, Homo sapiens
MSSRELKRRFEVFGEIEECEVLTRNRRGEKYGFITYRCSEHAALSLTKGAALRKRNEPSFQLSYGGLRHFCWPRYTDYGKPLKPSHSLVRLKAWEAVPSLNKTQS

SEQ ID NO: 3075 - protein, 187 aa, Homo sapiens
MAYEVYYGLTEEEGAVPAEHQVAMAAARALGDVTVLGSLLLQHLLHFSTPGLVLRSLGALTGPQLLSLAQSPAGSHVLDAILTSPSVTRKLRRRVLQNLKGQYVALACSRHGSRVLDAIWSGAALRARKEIAAELGEQNQELIRDPFGHHVARNVALTTFLKRREAWEQQQGAVAKRRRALNSILED

SEQ ID NO: 3076 - protein, 565 aa, Homo sapiens
MDVVFLIDNSRNIAKDEFKAVKALVSSVIDNFNIASDPLISDSGDRIALLSYSPWESSRRKMGTVKTEFDFITYDNQLLMKNHIQTSFQQLNGEATIGRALLWTTENLFPETPYLRKHKVIFVVSAGENYERKEFVKMMALRAKCQGYVIFVISLGSTRKDDMEELASYPLDQHLIQLGRIHKPDLNYIAKFLKPFLYSVRRGFNQYPPPMLEDACRLINLGGENIRNDGFQFVTELQEDFLGDNGFIGQELNSGRESPFVKTEDNGSDYLVYLPSQMFEPQKLMINYEKDQKSAEIASLTSGHENYGRKEEPDHTYEPGDVSLQEYYMDVAFLIDASQRVGSDEFKEVKAFITSVLDYFHIAPTPLTSTLGDRVAVLSYSPPGYMPNTEECPVYLEFDLVTYNSIHQMKHHLQDSQQLNGDVFIGHALQWTIDNVFVGTPNLRKNKVIFVISAGETNSLDKDVLRNVSLRAKCQGYSIFVFSFGPKHNDKELEELASHPLDHHLVQLGRTHKPDWNYIIKFVKPFVHLIRRAINKYPTEDMKATCVNMTSPNPENGGTENTVLW

SEQ ID NO: 3077 - protein, 304 aa, Homo sapiens
MGQCVTKCKNPSSTLGSKNGDREPSNKSHSRRGAGHREEQVPPCGKPGGDILVNGTKKAEAATEACQLPTSSGDAGRESKSNAEESSLQRLEELFRRYKDEREDAILEEGMERFCNDLCVDPTEFRVLLLAWKFQAATMCKFTRKEFFDGCKAISADSIDGICARFPSLLTEAKQEDKFKDLYRFTFQFGLDSEEGQRSLHREIAIALWKLVFTQNNPPVLDQWLNFLTENPSGIKGISRDTWNMFLNFTQVIGPDLSNYSEDEAWPSLFDTFVEWEMERRKREGEGRGALSSGPEGLCPEEQT

SEQ ID NO: 3078 - protein, 159 aa, Homo sapiens
MSRTTAGPTLSREQGAALSCLLLEPAKDEAMPQLPLRSTQCWPHRPTQGAELSPGAHGAGQRQRPLGRSAQSWVGPASGTLRPPHPPDLLSRRNPTRAAPSAPPSRDKLTSDNDFILTYLITAAPPPSSLSREQTLWPAPDSAPTPSANLKGNKYKLYK

SEQ ID NO: 3079 - protein, 112 aa, Homo sapiens
MFPFCISHTRDPKVCLPHFNWGGLDKVEFQLQETGCDMGEVPKAHRLKLRWLFPVSLCRAPLLSTAHLALLLPSCLLCSSCYYFPFLSLLPPWPNLFHRNITGPARHSGSPL

SEQ ID NO: 3080 - protein, 295 aa, Homo sapiens
MGEWAFLGSLLDAVQLQSPLVGRLWLVVMLIFRILVLATVGGAVFEDEQEEFVCNTLQPGCRQTCYDRAFPVSHYRFWLFHILLLSAPPVLFVVYSMHRAGKEAGGAEAAAQCAPGLPEAQCAPCALRARRARRCYLLSVALRLLAELTFLGGQALLYGFRVAPHFACAGPPCPHTVDCFVSRPTEKTVFVLFYFAVGLLSALLSVAELGHLLWKGRPRAGERDNRCNRAHEEAQKLLPPPPPPPIVVTWEENRHLQGEGSPGSPHPKTELDAPRFRRESTSPAGWHCSLPFHGT

SEQ ID NO: 3081 - protein, 134 aa, Homo sapiens [sequence omitted]

SEQ ID NO: 3082 - protein, 182 aa, Homo sapiens [sequence omitted]

SEQ ID NO: 3083 - protein, 109 aa, Homo sapiens [sequence omitted]

SEQ ID NO: 3084 - protein, 105 aa, Homo sapiens [sequence omitted]

SEQ ID NO: 3085 - protein, 784 aa, Homo sapiens
MTIVPTTDIEPVTVRTEATVTTLAPKTSQRTRTRRPRPKHKTTPRPETLQTKLDFGPITPGTSSAPTTTTKRTRRPHPKPKTTPHPEVPQTKLAPKVPQRTHRPHPKPKTTLSPEELQTELVPVTDLGPVTFRTEIPATTLATKTSKRTRPPRPRPKTTPSPQAPETKPVPATVLEPVTLRPEASTTLASKTSQRTRRPRLRTKTTPRPEAPESKPAPKQTPRAPPKPKTSPRPRIPQTQPVPKVPQRVTAKPKTSPSPEVSYTTPAPKDVLLPHKPYPEVSQSEPAPLETRGIPFIPMISPSPSQEELQTTLEETDQSTQEPFTTKIPRTTELAKTTQAPHRFYTTVRPRTSDKPHIRPVLNRTTTRPTRPKPSGMPSGNGVGTGVKQAPRPSGADRNVSVDSTHPTKKPGTRRPPLPPRPTHPRRKPLPPNNVTGKPGSAGIISSGPITTPPLRSTPRPTGTPLERIETDIKQPTVPASGEELENITDFSSSPTRETDPLGKPRFKGPHVRYIQKPDNSPCSITDSVKRFPKEEATEGNATSPPQNPPTNLTVVTVEGCPSFVILDWEKPLNDTVTEYEVISRENGSFSGKNKSIQMTNQTFSTVENLKPNTSYEFQVKPKNPLGEGPVSNTVAFSTESADPRVSEPVSAGRDAIWTERPFNSDSYSECKGKQYVKRTWYKKFVGVQLCNSLRYKIYLSDSLTGKFYNIGDQRGHGEDHCQFVDSFLDGRTGQQLTSDQLPIKEGYFRAVRQEPVQFGEIGGHTQINYVQWYECGTTIPGKW

SEQ ID NO: 3086 - protein, 391 aa, Homo sapiens
MAGVGAGPLRAMGRQALLLLALCATGAQGLYFHIGETEKRCFIEEIPDETMMWDKQKEVFLPSTPGLGMHVEVKDPDGKVVLSRQYGSEGRFTFTSHTPGDHQICLHSNSTRMALFAGGKLRVHLDIQVGEHANNYPEIAAKDKLTELQLRARQLLDQVEQIQKEQDYQRKKVHCLNMDSLSFQLGLYLSPHFLQASNTIEPGQQSFVQVRVSPSVSEFLLQLDSCHLDLGPEGGTVELIQGRAAKGNCVSLLSPSPEGDPRFSFLLHFYTVPIPKTGTLSCTVALRPKTGSQDQEVHRTVFMRLNIISPDLSGCTSKGLVLPAVLGITFGAFLIGALLTAALWYIYSHTRSPSKREPVVAVAAPASSESSSTNHSIGSTQSTPCSTSSMA

SEQ ID NO: 3087 - protein, 106 aa, Homo sapiens [sequence omitted]

SEQ ID NO: 3088 - protein, 285 aa, Homo sapiens
MLEIKMEEAMTYTEDSYGMDGKVNQPRLTADINWQGLEELHSVNENIYEYRQNYRLSLVDWTNYLKDLDRVFALLKSHYEQNKTNKTQTAQSDGFLVVSAEHAVSMEMASADSDEDPRHKVGKTPHLTLPADLQTLHLNRPTLSPESKLEWNNDIPEVNHLNSEHWRKTEKWTGHEETNHLETDFSGDGMTELELGPSPRLQPIHRHPKELPQYGGPGKDIFEDQLYLPVHSDGISVHQMFTMATAEHRSNSSIAGKMLTKVEKNHEKEKSQHLEGSTSSSLSSD

SEQ ID NO: 3089 - protein, 697 aa, Homo sapiens
MSEGPSSPWTQLAQPLGPPCQDTGPTHYPPPHHPPPHPPQALPCPPACRHPEKQGSYSPALPLQPLGGHKGTGYQAGGLGSPYLRQQAAQAPYIPPLGLDAYPYPSAPLPAPSPGLKLEPPLTPRCPLDFAPQTLSFPYARDDLSLYGASPGLGGTPPSQNNVRAVPQPGAFQRACQPLPASQPCSEPVRPAQEAEEKTWLPSCRKEKLQPRLSEHSGPPIVIRDSPVPCTPPALPPCARECQSLPQKEDARPPSSPPMPVIDNVFSLAPYRDYLDVPAPEATTEPDSATAEPDSAPATSEGQDKGCRGTLPAQEGPSGSKPLRGSLKEEVALDLSVRKPTAEASPVKASRSVEHAKPTAAMDVPDVGNMVSDLPGLKKIDTEAPGLPGVPVTTDAMPRTNFHSSVAFMFRKFKILRPAPLPAAVVPSTPTSAPAPTQPAPTPTSGPIGLRILAQQPLSVTCFSLALPSPPAVAVASPAPAPAPSPAPARAQAPASARDPAPAPAPVAGPAPASTSAPGDSLEQHFTGLHASLCDAISGSVAHSPPEKLREWLETAGPWGQAAWQDCQGVQGLLAKLLSQLQRFDRTHRCPFPHVVRAGAIFVPIHLVKERLFPRLPPASVDHVLQEHRVELRPTTLSEERALRELALPGCTSRMLKLLALRQLPDIYPDLLGLQWRDCVRRQLGEHGAAPVATGAV

SEQ ID NO: 3090 - protein, 412 aa, Homo sapiens [sequence omitted]

SEQ ID NO: 3091 - protein, 655 aa, Homo sapiens
MTESLPVSDVLESVTLSTESPKETIAPAKTDYVYPTAKAPLWPEEPKTEVVESITYVSEPPETTLETSPLPSQSITLPSPDEPQTEPAPKQTPRAPPKPKTSPRPRIPQTQPVPKVPQRVTAKPKTSPSPEVSYTTPAPKDVLLPHKPYPEVSQSEPAPLETRGIPFIPMISPSPSQEELQTTLEETDQSTQEPFTTKIPRTTELAKTTQAPHRFYTTVRPRTSDKPHIRPVLNRTTTRPTRPKPSGMPSGNGVGTGVKQAPRPSGADRNVSVDSTHPTKKPGTRRPPLPPRPTHPRRKPLPPNNVTGKPGSAGIISSGPITTPPLRSTPRPTGTPLERIETDIKQPTVPASGEELENITDFSSSPTRETDPLGKPRFKGPHVRYIQKPDNSPCSITDSVKRFPKEEATEGNATSPPQNPPTNLTVVTVEGCPSFVILDWEKPLNDTVTEYEVISRENGSFSGKNKSIQMTNQTFSTVENLKPNTSYEFQVKPKNPLGEGPVSNTVAFSTESADPRVSEPVSAGRDAIWTERPFNSDSYSECKGKQYVKRTWYKKFVGVQLCNSLRYKIYLSDSLTGKFYNIGDQRGHGEDHCQFVDSFLDGRTGQQLTSDQLPIKEGYFRAVRQEPVQFGEIGGHTQINYVQWYECGTTIPGKW

SEQ ID NO: 3092 - protein, 412 aa, Homo sapiens
MDARWWAVVVLAAFPSLGAGGETPEAPPESWTQLWFFRFVVNAAGYASFMVPGYLLVKACVFGNEPKASDEVPLAPRTEAAETTPMWQALKLLFCATGLQVSYLTWGVLQERVMTRSYGATATSPGERFTDSQFLVLMNRVLALIVAGLSCVLCKQPRHGAPMYRYSFASLSNVLSSWCQYEALKFVSFPTQVLAKASKVIPVMLMGKLVSRRSYEHWEYLTATLISIGVSMFLLSSGPEPRSSPATTLSGLILLAGYIAFDSFTSNWQDALFAYKMSSVQMMFGVNFFSCLFTVGSLLEQGALLEGTRFMGRHSEFAAHALLLSICSACGQLFIFYTIGQFGAAVFTIIMTLRQAFAILLSCLLYGHTVTVVGGLGVAVVFAALLLRVYARGRLKQRGKKAVPVESPVQKV

SEQ ID NO: 3093 - protein, 474 aa, Homo sapiens
MIVKNVGVLLIMSISLLSIRKFILVKNPVNVRNVGKFLVIAINLLCIRDFILVRNPMNVKNVGRPLLFTHNLIDIRKFTLVKNPICVRNVIRVFFSRLELTQHKRIHTGKKSYECKECGKVFQLIFYFKEHERIHTGKKPYECKECGKAFSVCGQLTRHQKIHTGVKPYECKECGKTFRLSFYLTEHRRTHAGKKPYECKECGESFNVRGQLNRHKTIHTGIKPFACKVCEKAFSYSGDLRVHSRIHTGEKPYECKECGKAFMLRSVLTEHQRLHTGVKPYECKECGKTFRVRSQISLHKKIHTDVKPYKCVRCGKTFRFGFYLTEHQRIHTGEKPYKCKECGKAFIRRGNLKEHLKIHSGLKPYDCKECGKSFSRRGQFTEHQKIHTGVKPYKCKECGKAFSRSVDLRIHQRIHTGEKPYECKQCGKAFRLNSHLTEHQRIHTGEKPYECKVCRKAFRQYSHLYQHQKTHNVI

SEQ ID NO: 3094 - protein, 237 aa, Homo sapiens [sequence omitted]

SEQ ID NO: 3095 - protein, 258 aa, Homo sapiens [sequence omitted]

SEQ ID NO: 3096 - protein, 130 aa, Homo sapiens [sequence omitted]

SEQ ID NO: 3097 - protein, 125 aa, Homo sapiens; identical to SEQ ID NO: 2715

SEQ ID NO: 3098 - protein, 258 aa, Homo sapiens [sequence omitted]

SEQ ID NO: 3099 - protein, 109 aa, Homo sapiens
MDFSESEKFMVLLWKNFILKRRRCIALVVEMVLTFLFSAALLATRSVITINKNGPFDFAAQPVDEVPFYITASLISPSPLELAYVPSRSTVVQGIIERVKMDLNPQMKG

SEQ ID NO: 3100 - protein, 228 aa, Homo sapiens
MEEQPQMQDADEPADSGGEGRAGGPPQVAGAQAACSEDRMTLLLRLRAQTKQQLLEYKSMVDASEEKTPEQIMQEKQIEAKIEDLENEIEEVKVAFEIKKLALDSVLMDNMKHLLELNKLIMKSQQESWDLEEKLLDIRKKRLQLKQASESKLLEIQTEKNKQKIDLDSMENSERIKIIRQNLQMEIKITTVIQHVFQNLILGSKVNWAEDPALKEIVLQLEKNVDMM

SEQ ID NO: 3101 - protein, 219 aa, Homo sapiens [sequence omitted]

SEQ ID NO: 3102 - protein, 147 aa, Homo sapiens
MAAAADSFSGGPAGVRLPRSPPLKVLAEQLRRDAEGGPGAWRLSRAAAGRGPLDLAAVWMQGRVVMADRGEARLRDPSGDFSVRGLERVPRGRPCLVPGKYVMVMGVVQACSPEPCLQAVKMTDLSDNPIHESMWELEVEDLHRNIP

SEQ ID NO: 3103 - protein, 104 aa, Homo sapiens
MIDDPSKGKEALAESGGLVGAGNGVFFPSTEAFWDGGAVLASRGLELAGSSVPCCERFQDFDLAQPASLHPTCATAFSQCDVECYSMSLYFPLLFLVMGTLEPS

SEQ ID NO: 3104 - protein, 163 aa, Homo sapiens [sequence omitted]

SEQ ID NO: 3105 - protein, 553 aa, Homo sapiens [sequence omitted]

SEQ ID NO: 3106 - protein, 118 aa, Homo sapiens
MAAPPEPGEPEERKSLKLLGFLDVENTPCARHSILYGSLGSVVAGFGHFLFTSRIRRSCDVGVGGFILVTLGCWFHCRYNYAKQRIQERIAREEIKKKILYEGTHLDPERKHNGSSSN

SEQ ID NO: 3107 - protein, 114 aa, Homo sapiens
METCLLPAPLPPSAPAPLPRSAPAPLPRSAPAPLPPSAPAPLPRSAPAPLPRSAPAPLPPSAPAPLPRSAPAPLPPSAPAPLPRSAPAPLPRSVPAPLPPSVPAQGSSSLLLTF

SEQ ID NO: 3108 - protein, 483 aa, Homo sapiens [sequence omitted]

SEQ ID NO: 3109 - protein, 225 aa, Homo sapiens
MPLSPLWSVLFFIMLFCLGLSSMFGNMEGVVVPLQDLRVIPPKWPKEVLTGLICLGTFLIGFIFTLNSGQYWLSLLDSYAGSIPLLIIAFCEMFSVVYVYGVDRFNKDIEFMIGHKPNIFWQVTWRVVSPLLMLIIFLFFFVVEVSQELTYSIWDPGYEEFPKSQKISYPNWVYVVVVIVAGVPSLTIPGYAIYKLIRNHCQKPGDHQGLVSTLSTASMNGDLKY

SEQ ID NO: 3110 - protein, 367 aa, Homo sapiens
MCGDGTNDVGALKHADVGVALLANAPERVVERRRRPRDSPTLSNSGIRATSRTAKQRSGLPPSEEQPTSQRDRLSQVLRDLEDESTPIVKLGDASIAAPFTSKLSSIQCICHVIKQGRCTLVTTLQMFKILALNALILAYSQSVLYLEGVKFSDFQATLQGLLLAGCFLFISRSKPLKTLSRERPLPNIFNLYTILTVMLQFFVHFLSLVYLYREAQARSPEKQEQFVDLYKEFEPSLVNSTVYIMAMAMQMATFAINYKVRPGPCPNIHCLPTQPHPMKPSVPHPHRARPSWRACPRTSPWCGVWQFHSWPSLACSSAPRPTSTASLASWTSLWSSSWSLPRSCSWTSAWRSWPTASCSSSWGPRS

SEQ ID NO: 3111 - protein, 384 aa, Homo sapiens [sequence omitted]

SEQ ID NO: 3112 - protein, 815 aa, Homo sapiens [sequence omitted]

SEQ ID NO: 3113 - protein, 102 aa, Homo sapiens
MGTSATPWSAFTRPGNTAQSLRPGRPLGSRGGEAVGVASGRRSREPHFPECRAQPRPARPAPRGRGSRGLRREDAKRPPGLRGAAQESARPPGARAGLVRFR

SEQ ID NO: 3114 - protein, 113 aa, Homo sapiens
MVSKHVPWSPASKHSIAHTASLSLGSSHTFSRVRAVSVGSGEATETATGSLKSARASLGRCLENTPGDIVSSLASEMLCSYFRSSLKLSGMLPSLSCFSSCCGPQVQGLTSEC

SEQ ID NO: 3115 - protein, 157 aa, Homo sapiens
MQVQLPHPHSLGTNAGAASPSPLFRHKCRCSFPIPTLRAQMQVQLPHPHSLGTNAGAASPSPLFRHKCRCSFPIPTLRAQMQVQLPHPHSLGTNAGAASPSPLLGHKCRCSFPIPTLRAQMQVQLPHPHSLGTNAGAASPSPLLGHKCRCSFPIPTL

SEQ ID NO: 3116 - protein, 525 aa, Homo sapiens
MAGLWLGLVWQKLLLWGAASALSLAGASLVLSLLQRVASYARKWQQMRPIPTVARAYPLVGHALLMKPDGREFFQQIIEYTEEYRHMPLLKLWVGPVPMVALYNAENVEVILTSSKQIDKSSMYKFLEPWLGLGLLTSTGNKWRSRRKMLTPTFHFTILEDFLDIMNEQANILVKKLEKHINQEAFNCFFYITLCALDIICETAMGKNIGAQSNDDSEYVRAVYRMSEMIFRRIKMPWLWLDLWYLMFKEGWEHKKSLKILHTFTNSVIAERANEMNANEDCRGDGRGSAPSKNKRRAFLDLLLSVTDDEGNRLSHEDIREEVDTFMFEGHDTTAAAINWSLYLLGSNPEVQKKVDHELDDVFGKSDRPATVEDLKKLRYLECVIKETLRLFPSVPLFARSVSEDCEVAGYRVLKGTEAVIIPYALHRDPRYFPNPEEFQPERFFPENAQGRHPYAYVPFSAGPRNCIGQKFAVMEEKTILSCILRHFWIESNQKREELGLEGQLILRPSNGIWIKLKRRNADER

SEQ ID NO: 3117 - protein, 172 aa, Homo sapiens
MLTEVMEVWHGLVIAVVSLFLQACFLTAINYLLSRHMAHKSEQILKAASLQVPRPSPGHHHPPAVKEMKETQTERDIPMSDSLYRHDSDTPSDSLDSSCSSPPACQATEDVDYTQVVFSDPGELKNDSPLDYENIKEITDYVNVNPERHKPSFWYFVNPALSEPAEYDQVAM

SEQ ID NO: 3118 - protein, 100 aa, Homo sapiens [sequence omitted]

SEQ ID NO: 3119 - protein, 179 aa, Homo sapiens
MPRSSVRFSLFPHVQPIVFKEKLTMKTGLLMEEKLECSLWCCLSDPSIPGRCCVLERHIVPWMQQLHQQWKWLICGLCRLYNLPKHPNVEMPDQPLPMGQNGTTEEVTSKEEEEEEMDEDIEDLDHCEMKEEPTSEKKLEDEGTEKENWAILEKIRKTERQGHLNVLTLIVLCTVIFRS

SEQ ID NO: 3120 - protein, 742 aa, Homo sapiens [sequence omitted]

SEQ ID NO: 3121 - protein, 368 aa, Homo sapiens
MMFRSDRMWSCHWKWKPSPLLFLFALYIMCVPHSVWGCANCRVVLSNPSGTFTSPCYPNDYPNSQACMWTLRAPTGYIIQITFNDFDIEEAPNCIYDSLSLDNGESQTKFCGATAKGLSFNSSANEMHVSFSSDFSIQKKGFNASYIRVAVSLRNQKVILPQTSDAYQVSVAKSISIPELSAFTLCFEATKVGHEDSDWTAFSYSNASFTQLLSFGKAKSGYFLSISDSQCLLNNALPVKEKEDIFAESFEQLCLVWNNSLGSIGVNFKRNYETVPCDSTISKVIPGNGKLLLGSNQNEIVSLKGDIYNFRLWNFTMNAKILSNLSCNVKGNVVDWQNDFWNIPNLALKAESNLSCGEFVAYSFFFFF

SEQ ID NO: 3122 - protein, 195 aa, Homo sapiens [sequence omitted]

SEQ ID NO: 3123 - protein, 278 aa, Homo sapiens
MSGLTVSQSGPSSGSGGQTSGLAVSQSGPSSGSGGQTSGLAVSAEWPFLRLWRTDVRARGVTEWPFLRLWRTDVRARGVSRVALPPALEDRSLGSRCHRVALPPALEDRSLGSRCQQSGPSSGSGGQTSGLAVSQSGPSSGSGRQTSGITVSAEWPFLWLWRTDVWDHGVSRGALPLEPLVGNLLVASFGFWWLVFLFSFFIFFFFNLIRDRVCLCSPGWSQTPGLKQSSCSVLTKCCGYRRESWGPACWCFLTCGPITAVSAFRVTWPSPLLEHPLL

SEQ ID NO: 3124 - protein, 103 aa, Homo sapiens
MGNSLSIRPDSTMGNSTPVPPDSSLGYIIHHWNQFDPDTLKGKCIIFFCNTVWPHYELPSPQQWAVSGSLNDDTILQLDLLCKRLGRWSEVPYVQAFIKISKT

SEQ ID NO: 3125 - protein, 349 aa, Homo sapiens
MAPRSLLLLLSGALALTDTWAGSHSLRYFSTAVSRPGRGEPRYIAVEYVDDTQFLRFDSDAAIPRMEPREPWVEQEGPQYWEWTTGYAKANAQTDRVALRNLLRRYLENGKETLQRADPPKAHVAHHPISDHEATLRCWALGFYPAEITLTWQRDGEEQTQDTELVETRPAGDGTFQKWAAVVVPSGEEQRYTCHVQHEGLPQPLILRWEQSPQPTIPIVGIVAGLVVLGAVVTGAVVAAVMWRKKSSDRNRGSYSQAAAYSVVSGNLMITWWSSLFLLGVLFQGYLGCLRSHSVLGRRKAQLLSVSTSQTSILIQEQFSHQRTLAMSGKMFCCHDWSEEKVLPASCGE

SEQ ID NO: 3126 - protein, 218 aa, Homo sapiens
MAALIAENFRFLSLFFKSKDVMIFNGLVALGTVGSQELFSVVAFHCPCSPARNYLYGLAAIGVPALVLFIIGIILNNHTWNLVAECQHRRTKNCSAAPTFLLLSSILGRAAVAPVTWSVISLLRGEAYVCALSEFVDPSSLTAREEHFPSAHATEILARFPCKENPDNLSDFREEVSRRLRYESQVRSCAKGSSSSLVVAGERSGDGLVLKLGLVLRG

SEQ ID NO: 3127 - protein, 468 aa, Homo sapiens
MAHSVPSDSRTSRRPTTRPHAARGAPRGSRRPGRTPKWRLPRISARAPYRLRRLRRHTYWPPRRPVAASRCWPVGATPLGSVGGRTGKMDAATLTYDTLRFAEFEDFPETSEPVWILGRKYSIFTEKDEILSDVASRLWFTYRKNFPAIGGTGPTSDTGWGCMLRCGQMIFAQALVCRHLGRDWRWTQRKRQPDSYFSVLNAFIDRKDSYYSIHQIAQMGVGEGKSIGQWYGPNTVAQVLKKLAVFDTWSSLAVHIAMDNTVVMEEIRRLCRTSVPCAGATAFPADSDRHCNGFPAGAEVTNRPSPWRPLVLLIPLRLGLTDINEAYVETLKHCFMMPQSLGVIGGKPNSAHYFIGYVGEELIYLDPHTTQPAVEPTDGCFIPDESFHCQHPPCRMSIAELDPSIAVGFFCKTEDDFNDWCQQVKKLSLLGGALPMFELVELQPSHLACPDVLNLSLGESCQVQILLM

SEQ ID NO: 3128 - protein, 622 aa, Homo sapiens [sequence omitted]

SEQ ID NO: 3129 - protein, 112 aa, Homo sapiens
MVRWVPTRRVVVICDGTCSHTLLCTPPGSPKSPHAGSPHPSCSRKHVRKQSRRLLRGRHESTLVLKPFPNVLVDCVVLPKLPAAGAREVTPAGAAAGGSPRWLALFLFCFFF

SEQ ID NO: 3130 - protein, 140 aa, Homo sapiens [sequence omitted]

SEQ ID NO: 3131 - protein, 101 aa, Homo sapiens [sequence omitted]

SEQ ID NO: 3132 - protein, 167 aa, Homo sapiens
MHARYIGTTVFVRQVGRYLTLAIRMPEDLAMSYEESQDLQLCVNGCPLSERIDDGQGQVSAILGHSLPRTSLVQAWPGYTLETANTQCHEKMPVKDIYFQSCVFDLLTTGDANFTAAAHSALEDVEALHPRKERWHIFPSSGNGTPRGGSDLSVSLGLTCLILIVFL

SEQ ID NO: 3133 - protein, 156 aa, Homo sapiens [sequence omitted]

SEQ ID NO: 3134 - protein, 135 aa, Homo sapiens [sequence omitted]

SEQ ID NO: 3135 - protein, 124 aa, Homo sapiens
MSDHAGMPDLVLHPWWQVSLSWGRGKYPSTPSPSPLVASPAFLGGKNPPIAYFHAPTSYLCAPIPYFHAPISYLCTPIPYFRAPTLSLLFWRGRKPHPFSMSLLFSLGLPPSLCFHLPFLLLLP

SEQ ID NO: 3136 - protein, 122 aa, Homo sapiens
MSSCPGCALPKGMCTSKPLLAELPQDHASGPPPATPACLEQPPHRRPRLSGPAGGSARPPPRWWRRSPLASGRCPRYGPGSTCSPAHPSLARHLAEGRGADGWRIPIRTASHRGLAGCAPER

SEQ ID NO: 3137 - protein, 499 aa, Homo sapiens
MEFGLTWVFLVALLKGVQCEVQLVESGGTVVQPGGSLRLSCTATGFDMPSFTMHWVRQAPGKGLEWVSLISWDGGSYYHADAVRGRFVVSRDNGRHSLYLQMNNLRPEDTALYYCAKDPLRPNTYYYDSGDGAGIWGQGTMVTVSSASPTSPKVFPLSLCSTQPDGNVVIACLVQGFFPQEPLSVTWSESGQGVTARNFPPSQDASGDLYTTSSQLTLPATQCLAGKSVTCHVKHYTNPSQDVTVPCPVPSTPPTPSPSTPPTPSPSCCHPRLSLHRPALEDLLLGSEANLTCTLTGLRDASGVTFTWTPSSGKSAVQGPPERDLCGCYSVSSVLPGCAEPWNHGKTFTCTAAYPESKTPLTATLSKSGNTFRPEVHLLPPPSEELALNELVTLTCLARGFSPKDVLVRWLQGSQELPREKYLTWASRQEPSQGTTTFAVTSILRVAAEDWKKGDTFSCMVGHEALPLAFTQKTIDRLAGKPTHVNVSVVMAEVDGTCY

SEQ ID NO: 3138 - protein, 112 aa, Homo sapiens
MNLGGGACSQPRSGCCTPAWGTERDSASKKKKKKKERNFPEYSSPPEPSPFLRFVPISWTPYERLQRLKWEDCLSLGGRGCSELWSYHCTLAWATERDLVSKTATTKNYLGI

SEQ ID NO: 3139 - protein, 163 aa, Homo sapiens
MGLQPLEFSDCYLDSPWFRERIRAHEAELERTNKFIKELIKDGKNLIAATKSLSVAQRKFAHSLRDFKFEFIGDAVTDDERCIDASLREFSNFLKNLEEQREIMALSVTETLIKPLEKFRKEQLGAVKEEKKKFDKETEKNYSLIDKHLNLSAKKKDSHLQEV

SEQ ID NO: 3140 - protein, 103 aa, Homo sapiens [sequence omitted]

SEQ ID NO: 3141 - protein, 182 aa, Homo sapiens [sequence omitted]

SEQ ID NO: 3142 - protein, 104 aa, Homo sapiens
MAAGNHSGGTCWPALHPVPLWAPLPSDSGHPWAPSLYRPGQEETTGNHPKDNMLVQCHSSLALWVPLWPVPTGWLILWFLYHHMPILRHSPALSVRECKFCNIF

SEQ ID NO: 3143 - protein, 138 aa, Homo sapiens
MTARHPAHKQRQSRGFSPLWRPRQSERKGRGCEHLRIYAAQGAPESCREPGWASAGNKGSPFCGTQALANLKHDSPKSAGAVPEPSAAQCPRRTSDHRDWDNVKAQPIQAHRPAHVVLGPSACALGKWLPWDCARAAS

SEQ ID NO: 3144 - protein, 104 aa, Homo sapiens; identical to SEQ ID NO: 3142

SEQ ID NO: 3145 - protein, 122 aa, Homo sapiens
MQLRQGLKYTLVSCSTLRLTRVGKNLALANLWSDWFSALEPCVLLFKMFIKTIRALLNIDPYQEFYFCPCPVSSEACDLCSAFCPLKHVIFVPTPRSYTPSPFAILNKNLLVLRLGPASRSY

SEQ ID NO: 3146 - protein, 223 aa, Homo sapiens
MVQRESLSSEGALGGKELQPRGWGTHHSRIPKSCTPAGRILVPSHYHHSPPVPQEPPCREQQESGSFRACRGLGSLASKPLGPGVSLTRNGTGVEPWGCGQAGLFPGPGNGSQGWSLAQVSCPWLRSLSLPGLRAHLKAEAELPPKLPLQEEEPEDSQSEPSPSAKQHKKAKKRKSLGAPVLHAVASMVSAPLETLRLEREWQSLDCSFSPCLWGPTWHNLAL

SEQ ID NO: 3147 - protein, 174 aa, Homo sapiens
MARVQAPRLASACLAHSCPLSGGGCSEESGCRLTSPEKPEPKMEIKFEMLDASGDESGQKSSKRARLQGANGAPPGGSAPSPPASSSSSSSSSWPGSRLRCLSLQEVGLVPFGYLHSPSPHSPSWHFPCCSFMECASGSPTRLEPLECITRDLTICVSLRPAQPPHTGTCREWM

SEQ ID NO: 3148 - protein, 435 aa, Homo sapiens
MKWGWVFLGALLSLGNMSWGEKGLEIPEYDGKDRVHDLNAKNYKSVMKKYDVMVIYYHAHVESNKNAQKAFEMEELALELAAQVLDDLDDEDIGFGLVDEKKDLSVAKKLGLDEVESIYIFVDNEIIEYDGELAADTLVEFLYDVIEDPVEIIDNERELKGFHNIDEDIKLVGYFKSEKSPHFIEYDDAAEEFHPFIKFFATFDAKIAKKLKMKLNEVDFYEPFMEEPVTIPGQPYSEAELVDYIEEHDRPTLRKLEPHSMYETWEDDIDGEHIVAFAEEDDPDGYEFLEILKEVARENTDNADLSIIWIDPDDFPLLVPYWEKTFGIDLGSPQIGVVDVEDADSVWMEMDDDEDMPTADELEDWIEDVLSGKIDPDDDDDDDDDDDDDDDDDDDDDDDDDDDDDDDDDDDDDDDDDDDDDDDDDDDDDDDDDDE

SEQ ID NO: 3149 - protein, 135 aa, Homo sapiens
MGNYLLRKLSCLGENQKKPKKGNPDEERKRQEMTTFERKLQDRDKKSQEVSSTSNQENENGSGSEEVCYTVINHIPHQRSSLSSNDDGYENIDSLTRKVRQFRERSETEYALLRTSVSRPCSCTHEHDYEVVFPH

SEQ ID NO: 3150 - protein, 122 aa, Homo sapiens [sequence omitted]

SEQ ID NO: 3151 - protein, 477 aa, Homo sapiens [sequence omitted]

SEQ ID NO: 3152 - protein, 148 aa, Homo sapiens
MCAGVHVFTFPPAETSDAVKPSHIKQYTLTGHIALWDSKVFCKFWSLEGFLESGFCLVCEHFCQFLKHGLPCLLPRCRAVSFNHGHPLSHHLKGHTFHVECGRLESLKNTLFFPITLCSFLGNMCSIFVSHSEFFWAVCRWAWTNFRA

SEQ ID NO: 3153 - protein, 336 aa, Homo sapiens [sequence omitted]

SEQ ID NO: 3154 - protein, 101 aa, Homo sapiens
MCPSWTGGRAGHRDPGSFRSRDWRVGRHPWEHPCPPSAAQGRGGEPGFGPHLIKSPPQTPQANTGRWAVTPRSPAAATLLWTSSSSSATITRWPSRWAGAT

SEQ ID NO: 3155 - protein, 505 aa, Homo sapiens
MPQQLLITLPTEASTWVKLQHPKKAVEGAPLWEDVTKMFEGEALLSQDAEDVKTQRESLEDEVTPGLPTAESQELLTFKDISIDFTQEEWGQLAPAHQNLYREVMLENYSNLVSVGYQLSKPSVISQLEKGEEPWMAEKEGPGDPSSDLKSKIETIESTAKSTISQERLYHGIMMESFMRDDIIYSTLRKVSTYDDVLERHQETCMRDVRQAILTHKKRVQETNKFGENIIVHSNVIIEQRHHKYDTPTKRNTYKLDLINHPTSYIRTKTYECNICEKIFKQPIHLTEHMRIHTGEKPFRCKECGRAFSQSASLSTHQRIHTGEKPFECEECGKAFRHRSSLNQHHRTHTGEKPYVCDKCQKAFSQNISLVQHLRTHSGEKPFTCNECGKTFRQIRHLSEHIRIHTGEKPYACTACCKTFSHRAYLTHHQRIHTGERPYKCKECGKAFRQRIHLSNHKTVHTGVKAYECNRCGKAYRHDSSFKKHQRHHTGEKPYECNECGKAFS

SEQ ID NO: 3156 - protein, 328 aa, Homo sapiens [sequence omitted]

SEQ ID NO: 3157 - protein, 125 aa, Homo sapiens [sequence omitted]

SEQ ID NO: 3158 - protein, 178 aa, Homo sapiens [sequence omitted]

SEQ ID NO: 3159 - protein, 252 aa, Homo sapiens
MIKEAGAIISTRHCNPQNGDRCVAALARVECTHFLWPMCIGEVAHVSAEITYTSKHSVEVQVNMMSENILTGAKKLTNKATLWYAPLSLTNVDKVLEEPPVVYFRQEQEEEGQKRYKTQKLERMETNWRNGDIVQPVLNPEPNTVSYSQSSLIHLVGPSDCTLHSFVHEGVTMKVMDEVAGILAARHCKTNLVTASMEAINFDNKIRKGCIKTISGRMTFTSNKSVEIEVLVDADCVVDSSQKRYRAASVFT

SEQ ID NO: 3160 - protein, 458 aa, Homo sapiens
MELPLGRCDDSRTWDDDSDPESETDPDAQAKAYVARVLSPPKSGLAFSRPSQLSTPAASPSASEPRAASRVSAVSEPGLLSLPPELLLEICSYLDARLVLHVLSRVCHALRDLVSDHVTWRLRALRRVRAPYPVVEEKNFDWPAACIALEQHLSRWAEDGRWVEYFCLAEGHVASVDSVLLLQGGSLCLSGSRDRNVNLWDLRQLGTESNQVLIKTLGTKRNSTHEGWVWSLAAQDHRVCSGSWDSTVKLWDMAADGQQFGEIKASSAVLCLSYLPDILVTGTYDKKVTIYDPRAGPALLKHQQLHSRPVLTLLADDRHIISGSEDHTLVVVDRRANSVLQRLQLDSYLLCMSYQEPQLWAGDNQGLLHVFANRNGCFQLIRSFDVGHSFPITGIQYSVGALYTTSTDKTIRVHVPTDPPRTICTRRHDNGLNRVCAEGNLVVAGSGDLSLEVWRLQA

SEQ ID NO: 3161 - protein, 631 aa, Homo sapiens
MFSPDQSSMPMSNVGTTRLSHMPLPPASNPPGTVHSAPNRGLGRRPSDLTISINQMGSPGMGHLKSPTLSQVHSPLVTSPSANLKSPQTPSQMVPLPSANPPGPLKSPQVLGSSLSVRSPTGSPSRLKSPSMAVPSPGWVASPKTAMPSPGVSQNKQPPLNMNSSTTLSNMEQGTLPPSGPRSSSSAPPANPPSGLMNPSLPFTSSPDPTPSQNPLSLMMTQMSKYAMPSSTPLYHNAIKTIATSDDELLPDRPLLPPPPPPQGSGPGISNSQPSQMHLNSAAAQSPMGMNLPGQQPLSHEPPPAMLPSPTPLGSNIPLHPNAQGTGGPPQNSMMMAPGGPDSLNAPCGPVPSSSQMMPFPPRLQQPHGAMAPTGGGGGGPGLQQHYPSGMALPPEDLPNQPPGPMPPQQHLMGKAMAGRMGDAYPPGVLPGVASVLNDPELSEVIRPTPTGIPEFDLSRIIPSEKPSSTLQYFPKSENQPPKAQPPNLHLMNLQNMMAEQTPSRPPNLPGQQGVQRGLNMSMCHPGQMSLLGRTGVPPQQGMVPHGLHQGVMSPPQGLMTQQNFMLMKQRGVGGEVYSQPPHMLSPQGSLMGPPPQQNLMVSHPLRQRSVSLDSQMGYLPAPGGMANLPF

SEQ ID NO: 3162 - protein, 542 aa, Homo sapiens
MPRRGLILHTRTHWLLLGLALLCSLVLFMYLLECAPQTDGNASLPGVVGENYGKEYYQALLQEQEEHYQTRATSLKRQIAQLKQELQEMSEKMRSLQERRNVGANGIGYQSNKEQAPSDLLEFLHSQIDKAEVSIGAKLPSEYGVIPFESFTLMKVFQLEMGLTRHPEEKPVRKDKRDELVEVIEAGLEVINNPDEDDEQEDEEGPLGEKLIFNENDFVEGYYRTERDKGTQYELFFKKADLTEYRHVTLFRPFGPLMKVKSEMIDITRSIINIIVPLAERTEAFVQFMQNFRDVCIHQDKKIHLTVVYFGKEGLSKVKSILESVTSESNFHNYTLVSLNEEFNRGRGLNVGARAWDKGEVLMFFCDVDIYFSAEFLNSCRLNAEPGKKVFYPVVFSLYNPAIVYANQEVPPPVEQQLVHKKDSGFWRDFGFGMTCQYRSDFLTIGGFDMEVKGWGGEDVHLYRKYLHGDLIVIRTPVPGLFHLWHEKRCADELTPEQYRMCIQSKAMNEASHSHLGMLVFREEIETHLHKQAYRTNSEAVG

SEQ ID NO: 3163 - protein, 222 aa, Homo sapiens
MYQDFIFFFFFLRWSFILLAQAGVQWCSLSSLQPLPSRFKRFSCLGFPSSQDYRRLAPCPATFFVFLVETGFHHVGQAGLKLLTSGDPPASASQRAGITGVSHHGQPSFIFMEKNISLYEYTTFCLSIYPLIGCFYFFLAIMNNIAVNICVQGFSGHKFLFFLGIYLGVELLGHIVILFNFLKNFPTVLHGGCAIVYSYQQCMKLQISPHPENPFIIFCFSF

SEQ ID NO: 3164 - protein, 477 aa, Homo sapiens [sequence omitted]

SEQ ID NO: 3165 - protein, 182 aa, Homo sapiens
MRRCRRCARWPHRCPGPQSGPRSHFSPWPRTLGPAPALCVRTPLRPGPSSALGPLSACPSVPDYTASPPAGDSARSIVAASRAAGSGSTPGAGSKDCSPPPHSHSAAAAGESGDIGPGSGAVEAPGRGARRPTRQREDGGGAVGCFGVSRHRGREAQMSHSSHCGSRSCSAAAARPSLLQLA

SEQ ID NO: 3166 - protein, 142 aa, Homo sapiens
MNVVAQRRGEGWGEMRNRKKIPREIKRPRGAEPGSRWSRQMEQQRQRTEPQSGHTARPGSQALWVWWEQMLVWEQQLMAPSTCILVDSRPSTASSAAGLSLEEQPWSREADEWQPCPVGAPVLLLHPPPGSAHLLRLPPRAS

SEQ ID NO: 3167 - protein, 158 aa, Homo sapiens
MIAQRRDAMAHRILSARLHKIKGLKNELADMHHKLEAILTENQFLKQLQLRHLKAIGKYENSQNNLPQIMAKHQNEVKNLRQLLRKSQEKERTLSRKLRETDSQLLKTKDILQALQKLSEDKNLAEREELTHKLSIITTKMDANDKKIQVCISGAQTV

SEQ ID NO: 3168 - protein, 196 aa, Homo sapiens
MGNKAKIAKCPLRTKTGHILKSTQDTCIGSEKLLQKKPVGSETSQAKGEKNGMTFSSTKDLCKQCIDKDCLHIQKEISPATPNMQKTRNTVNTSLVGKQKPHKKHITAENMKSSLVCLTQDQLQQILMTVNQGNRSLSLTENGKEAKSQYSLYLNSISNQPKDENIMGLFKKTEMVSSVPAENKSVLNEHQETSKQ

SEQ ID NO: 3169 - protein, 119 aa, Homo sapiens [sequence omitted]

SEQ ID NO: 3170 - protein, 675 aa, Homo sapiens
MLLAPQGRSFSKKRMGLNRWKRFTRKPSPKPTFGPDSVEHWIKRVEKASEFAVSNAFFTRNSDLPRSPWGQITDLKTSEQIEDHDEIYAEAQELVNDWLDTKLKQELASEEEGDAKNTVSSVTIMPEANGHLKYDKFDDLCGYLEEEEESTTVQKFIDHLLHKNVVDSAMMEDLGRKENQDKKQQKDPRLTMEMRHKQVKENRLRREKELEYQRIEKTLKKSAFLEAQCLVQEEKKRKALEAKKEEEEIQREMVKLRREIIERRRTVKAAWKIEKKRQEENSQNSSEKVMFQSTHILPDEEKMVKERKRKLKEVLIQTFKENQQCQKRYFAAWHKLILDHRIKLGKAGTLSDWKIQLKVLRAWRDYTRFQKLERETQALENDLREENRKQQLATEYNRKQVLRHCFTEWQHWHGAELLKRELALTKEETRKKMDALLQAASLGKLSANGLSGISLPEEATAMVGPPVKNGQETAVPPLWEKPPLGSSGCMLSPPLGRTTTGNLQGSLQNVSLSAPGNKQHKTLGAEPSQQPGSNETLRTTSQKAEPLCLGHFHNRHVFQQQLIEKQKKKLQEQQKTILELKKNLQLAEAQWAAEHALAVTEAQSHLLSKPREEEPRTCQMLVNSPVASPGTEGRSDSRNSLSGLRRKPKQLMTPHPILKAMEERAIQRAECRRIL

SEQ ID NO: 3171 - protein, 188 aa, Homo sapiens
MGFHHVGQAGLGLLTSCSTRFGLPRFWDYRCEPPCTAGLTFGKALSLWTFASLKRRWEHIMTACHHCFSDYHNSIMLSRTSGPVFTTGKTYFRLDSLKRSNALVGCGEGKIRTLTLKDTSEIVRSLGSWSTRLHALRPSVVFSEQALSTSSRKQQQKNTSFLPCLLDMKRQLHSTLHYVLHVALSVYA

SEQ ID NO: 3172 - protein, 138 aa, Homo sapiens [sequence omitted]

SEQ ID NO: 3173 - protein, 221 aa, Homo sapiens
MAAAGPLCTERVSVLSQPNSGVEDPTPAGGRGQGRRRGREELESIGAGPGASVRILPALRPGLGGVWGAGAASLVFQAGPGSSWLGWPDLDLALYRGWACRSEGTANVAFPGTASPGFSRARQTRDLRKPALKTPSHTASQLAAEAGNPSGGCPSMRCQRRVGALVPTWKGGWRDGWSGSGGRAKERILAFSFPAGGGIRGERVQAASNTRIWEEPGSTPN

SEQ ID NO: 3174 - protein, 176 aa, Homo sapiens [sequence omitted]

SEQ ID NO: 3175 - protein, 128 aa, Homo sapiens [sequence omitted]

SEQ ID NO: 3176 - protein, 136 aa, Homo sapiens [sequence omitted]

SEQ ID NO: 3177 - protein, 303 aa, Homo sapiens
MALDFLAGCAGGVAGVLVGHPFDTVKVRLQVQSVEKPQYRGTLHCFKSIIKQESVLGLYKGLGSPLMGLTFINALVFGVQGNTLRALGHDSPLNQFLAGAAAGAIQCVICCPMELAKTRLQLQDAGPARTYKGSLDCLAQIYGHEGLRGVNRGMVSTLLRETPSFGVYFLTYDALTRALGCEPGDRLLVPKLLLAGGTSGIVSWLSTYPVDVVKSRLQADGLRGAPRYRGILDCVHQSYRAEGWRVFTRGLASTLLRAFPVNAATFATVTVVLTYARGEEAGPEGEAVPAAPAGPALAQPSSL

SEQ ID NO: 3178 - protein, 694 aa, Homo sapiens [sequence omitted]

SEQ ID NO: 3179 - protein, 110 aa, Homo sapiens
MRKNFGVRAELCEGLLGWGISSYGPHAIYLLLERGDFEWVGMDRCSSRKPCWLMGTTSVYYCDSLCKLPMWPRTPLLPGHFLPPHCTGLNHSACCCCTMLGCGRIGKGFC

SEQ ID NO: 3180 - protein, 105 aa, Homo sapiens [sequence omitted]

SEQ ID NO: 3181 - protein, 219 aa, Homo sapiens
MSSPHKNSVPSSLNEYEVLPNGCEAHWEVVERILFIYAKLNPGIAYVQGMNEIVGPLYYTFATDPNSEWKEHAEADTFFCFTNLMAEIRDNFIKSLDDSQCGITYKMEKVYSTLKDKDVELYLKLQEQNIKPQFFAFRWLTLLLSQEFLLPDVIRIWDSLFADDNRFDFLLLVCCAMLMLIREQLLEGDFTVNMRLLQDYPITDVCQILQKAKELQDSK

SEQ ID NO: 3182 - protein, 138 aa, Homo sapiens [sequence omitted]

SEQ ID NO: 3183 - protein, 838 aa, Homo sapiens [sequence omitted]

SEQ ID NO: 3184 - protein, 114 aa, Homo sapiens [sequence omitted]

SEQ ID NO: 3185 - protein, 294 aa, Homo sapiens
MLRQVLRRGLQSFCHRLGLCVSRHPVFFLTVPAVLTITFGLSALNRFQPEGDLERLVAPSHSLAKIERSLASSLFPLDQSKSQLYSDLHTPGRYGRVILLSPTGDNILLQAEGILQTHRAVLEMKDGRNSFIGHQLGGVVEVPNSKDQRVKSARAIQITYYLQTYGSATQDLIGEKWENEFCKLIRKLQEEHQELQLYSLASFSLWRDFHKTSILARSKVLVSLVLILTTATLSSSMKDCLRSKPFLGLLGVLTVCISIITAAGIFFITDGKYNSTLLGIPFFAMGISTEFTSS

SEQ ID NO: 3186 - protein, 102 aa, Homo sapiens [sequence omitted]

SEQ ID NO: 3187 - protein, 100 aa, Homo sapiens
MPSWRLSLFIIGSHSLVGYLCDLASDVPGQRPPWLQPRRRTRSRVGWSGSWEERVSACPGTPSSREDTEARTPLGFPGKWRRSVLGRSSELIPPRIGAGL

SEQ ID NO: 3188 - protein, 126 aa, Homo sapiens
MGNFWKGRQPFLKFQNEKDVILILTGSLFIFLKKESFLLSHFQLFFSLLFFFSFLSPLLLFLFPSPPPFFFFYCSLQSRATPIGSVTKVTPSSHFCPDFFSLFQAVRLSCCLCSWAIIPSFAYCRL

SEQ ID NO: 3189 - protein, 162 aa, Homo sapiens [sequence omitted]

SEQ ID NO: 3190 - protein, 680 aa, Homo sapiens [sequence omitted]

SEQ ID NO: 3191 - protein, 198 aa, Homo sapiens
MCGIYAHVQEKPRTQSSLDLMQIPPAKASAFSDPACPGDPTPHLLLELLDCTEVGLVVGAHGGLVALAPLEECGLQLCILLLQLAHLLQVVGQAVIQELHGLLLMAIQGVFAVGPTDSDVAGNVTGPWQGTSSVTGWGQTEAGAAQGSRPHTDSVGVCHVGQEAHGGSIGLCHRLAPNIDRRDKDISCSRSHGATQRA

SEQ ID NO: 3192 - protein, 225 aa, Homo sapiens [sequence omitted]

SEQ ID NO: 3193 - protein, 590 aa, Homo sapiens
MATPRGRTKKKASFDHSPDSLPLRSSGRQAKKKATETTDEDEDGGSEKKYRKCEKAGCTATCPVCFASASERCAKNGYTSRWYHLSCGEHFCNECFDHYYRSHKDGYDKYTTWKKIWTSNGKTEPSPKAFMADQQLPYWVQCTKPECRKWRQLTKEIQLTPQIAKTYRCGMKPNTAIKPETSDHCSLPEDLEALTPQKCIPHIIVRGLVRIRCVQEVERILYFMTRKGLINTGVLSVGADQYLLPKDYHNKSVIIIGAGPAGLAAARQLHNFGIKVTVLEAKDRIGGRVWDDKSFKGVTVGRGAQIVNGCINNPVALMCEQVSARSWDHNEFFAQFAGDHTLLTPGYSVIIEKLAEGLDIQLKSPVQCIDYSGDEVQVTTTDGTGYSAQKVLVTVPLALLQKGAIQFNPPLSEKKMKATNSLGAGIIEKIALQFPYRFWDSKVQGADFFGHVPPSASKRGLFAVFYDMDPQKKHSVLMSVIAGEAVASVRTLDDKQVLQQCMATLRELFKEQEVPDPTKYFVTRWSTDPWIQMAYSFVKTGGSGEAYDIIAEDIQGTVFFAGEATNRHFPQTVTGAYLSGVREASKIAAF

SEQ ID NO: 3194 - protein, 175 aa, Homo sapiens
MTRTPVGSARTRPKPRKLGPQRGKALQASSRLSESPALVKKRMPDACTLGRAGIGLPKMCLHMAVRHSKAQKTGPGILQQRQKPPAPRASGGPALLGKRRGCSEAGSASLEPLSSSRAAAGCLNQVPLSPFLAGPRNTRRLPAPERERIELAATLCLEGWPLRCLASKGKLHCVY

SEQ ID NO: 3195 - protein, 235 aa, Homo sapiens
MRPDDINPRTGLVVALVSVFLVFGFMFTVSGMKGETLGNIPLLAIGPAICLPGIAAIALARKTEGCTKRPENELLWVRKLPCFRKPKDKEVVELLRTPSDLESGKGSSDELAKKAGLRGKPPPQSQGEVSVASSINSPTPTEEGECQSLVQNGHQEETSRYLDGYCPSGSSLTYSALDVKCSARDRSECPEPEDSIFFVPQDSIIVCSYKQNSPYDRYCCYINQIQGRWDHETIV

SEQ ID NO: 3196 - protein, 147 aa, Homo sapiens
MYWQNWTHNGRFWGAGVHLYLSRKQCALKNTSLSKFQTSHICKGSALQPQQASPGASSFLTCSELGVMYLKLVLGQMVQAVRRDSGLQPFGSLFLLITQKRAVLTPFLTKTWHSLRALVYRVWSLEESRYLQREKGLVDSFGVLWEE

SEQ ID NO: 3197 - protein, 200 aa, Homo sapiens
MAGWGSYSVTATPFTAVIMSMLSTSLESLVLSSVLIRFMALNPRSQQEVEMGTQTTTAMSLLSRGKRQCWARAFLQSMENGRCWAMVFRPSHSSSRASSLYPVGREHSKYLARLRMSSFPKLASSIPLGQAMVSNTSMFFSCGGRSASNLCWRYSIPVRTVLSLSAWNRCSATSSLSKQMPWSRPSLKLALNSSSLGPAW

SEQ ID NO: 3198 - protein, 303 aa, Homo sapiens [sequence omitted]

SEQ ID NO: 3199 - protein, 585 aa, Homo sapiens
MEMRLPIRSPIKRDFLSGIQIEFKQSSHQRSLRARLYWLQVDNQLPGAMFPVVFHPVAPPKSIALDSEPKPFIDVSVITRFNEYSKVLQFKYFMVLIQEMALKIDQGFLGAIIALFTPTTDPEAERRRTKLIQQDIDALNAELMETSMTDMSILSFFEHFHISPVKLHLSLSLGSGGEESDKEKQEMFAVHSVNLLLKSIGATLTDVDDLIFKLAYYEIRYQFYKRDQLIWSVVRHYSEQFLKQMYVLVLGLDVLGNPFGLIRGLSEGVEALFYEPFQGAVQGPEEFAEGLVIGVRSLFGHTVGGAAGVVSRITGSVGKGLAAITMDKEYQQKRREELSRQPRDFGDSLARGGKGFLRGVVGGVTGIITKPVEGAKKEGAAGFFKGIGKGLVGAVARPTGGIVDMASSTFQGIQRAAESTEEVSSLRPPRLIHEDGIIRPYDRQESEGSDLLENHIKKLEGETYRYHCAIPGSKKTILMVTNRRVLCIKEVEILGLMCVDWQCPFEDFVFPPSVSENVLKISVKEQGLFHKKDSANQGCVRKVYLKDTATAERACNAIEDAQSTRQQQKLMKQSSVRLLRPQLPS

SEQ ID NO: 3200 - protein, 1685 aa, Homo sapiens
MSLPFYQRCHQHYDLSYRNKDVRSTVSHYQREKKRSAVYTQGSTAYSSRSSAAHRRESEAFRRASASSSQQQASQHALSSEVSRKAASAYDYGSSHGLTDSSLLLDDYSSKLSPKPKRAKHSLLSGEEKENLPSDYMVPIFSGRQKHVSGITDTEEERIKEAAAYIAQRNLLASEEGITTPKQSTASKQTTASKQSTASKQSTASKQSTASRQSTASRQSVVSKQATSALQQEETSEKKSRKVVIREKAERLSLRKTLEETETYHAKLNEDHLLHAPEFIIKPRSHTVWEKENVKLHCSIAGWPEPRVTWYKNQVPINVHANPGKYIIESRYGMHTLEINACDFEDTAQYRASAMNVKGELSAYASVVVKRYKGEFDETRFHAGASTMPLSFGVTPYGYASRFEIHFDDKFDVSFGREGETMSLGCRVVITPEIKHFQPEIQWYRNGVPLSPSKWVQTLWSGERATLTFSHLNKEDEGLYTIRVRMGEYYEQYSAYVFVRDADAEIEGAPAAPLDVKCLEANKDYIIISWKQPAVDGGSPILGYFIDKCEVGTDSWSQCNDTPVKFARFPVTGLIEGRSYIFRVRAVNKMGIGFPSRVSEPVAALDPAEKARLKSRPSAPWTGQIIVTEEEPSEGIVPGPPTDLSVTEATRSYVVLSWKPPGQRGHEGIMYFVEKCEAGTENWQRVNTELPVKSPRFALFDLAEGKSYCFRVRCSNSAGVGEPSEATEVTVVGDKLDIPKAPGKIIPSRNTDTSVVVSWEESKDAKELVGYYIEASVAGSGKWEPCNNNPVKGSRFTCHGLVTGQSYIFRVRAVNAAGLSEYSQDSEAIEVKAAIGGGVSPDVCPALSDEPGGLTASRGRVHEASPPTFQKDALLGSKPNKPSLPSSSQNLGQTEVSKVSETVQEELTPPPQKAAPQGKSKSDPLKKKTDRAPPSPPCDITCLESFRDSMVLGWKQPDKTGGAEITGYYVNYREVIDGVPGKWREANVKAVSEEAYKISNSKENMVYQFQVAAMNMAGLGAPSAVSECFKCEEWTIAVPGPPHSLKCSEVRKDSLVLQWKPPVHSGRTPVTGYFVDLKEAKAKEDQWRGLNEAAIKNVYLKVRGLKEGVSYVFRVRAINQAGVGKPSDLAGPVVAETRPGTKEVVVNVDDDGVISLNFECDKMTPKSEFSWSKDYVSTEDSPRLEVESKGNKTKMTFKDLGMDDLGIYSCDVTDTDGIASSYLIDEEELKRLLALSHEHKFPTVPVKSELAVEILEKGQVRFWMQAEKLSGNAKVNYIFNEKEIFEGPKYKMHIDRNTGIIEMFMEKLQDEDEGTYTFQLQDGKATNHSTVVLVGDVFKKLQKEAEFQRQEWIRKQGPHFVEYLSWEVTGECNVLLKCKVANIKKETHIVWYKDEREISVDEKHDFKDGICTLLITEFSKKDAGIYEVILKDDRGKDKSRLKLVDEAFKELMMEVCKKIALSATDLKIQSTAEGIQLYSFVTYYVEDLKVNWSHNGSAIRYSDRVKTGVTGEQIWLQINEPTPNDKGKYVMELFDGKTGHQKTVDLSGQAYDEAYAEFQRLKQAAIAEKNRARVLGGLPDVVTIQEGKALNLTCNVWGDPPPEVSWLKNEKALASDGHCNLKFEAGRTAYFTINGVSTADSGKYGLVVKNKYGSETSDFTVSVFIPEEEARMAALESLKGGKKAK

SEQ ID NO: 3201 - protein, 1309 aa, Homo sapiens [sequence omitted]

SEQ ID NO: 3202 - protein, 1266 aa, Homo sapiens [sequence omitted]

SEQ ID NO: 3203 - protein, 126 aa, Homo sapiens
MCSRSSHGGAQRSGLRGDACTVQERGAPCRASAVGGAQAPRVGAGVVSTVHICTYVRTRLWGTEGPFALPGDWSRVAGPTCTACPQKGQGKASSIPLGPQPPTCLGKHGSWRPREATTLLSRQAPN

SEQ ID NO: 3204 - protein, 129 aa, Homo sapiens
MLRFSHCRLCTISICPVTCNAQWITCLRWCLPSCSTIKLFFSFLLLIRILWGGTLKVYKNLIVHPTFSSFTYLFISVWTHDFQCYSMGYNPLLSLFILMLRSSPIWPMGPPLSSFTHSKKEKKKFPMIT

SEQ ID NO: 3205 - protein, 1281 aa, Homo sapiens
MISTLATFPPFLHKDIIEYLSTSFLPMAILGSSRREGVPAHVNLSASSMLMIAMQYTSNPVYHCQLLECLMKYKQEVWKDLLYVIAYGPSQVKPPAVQMLFHYWPNLKPPGAISEYRGLQYTAWNPIHCQHIECHNAINKPAVKMCIDPSLSVALGDKPPPLYLCEECSERIAGDHSEWLIDVLLPQAEISAICQKKNCSSHVRRAVVTCFSAGCCGRHGNRPVRYCKRCHSNHHSNEVGAAAETHLYQTSPPPINTRECGAEELVCAVEAVISLLKEAEFHAEQREHELNRRRQLGLSSSHHSLDNADFDNKDDDRHDQRLLSQFGIWFLVSLCTPSENTPTESLARLVAMVFQWFHSTAYMMDDEVGSLVEKLKPQFVTKWLKTVCDVRFDVMVMCLLPKPMEFARVGGYWDKSCSTVTQLKEGLNRILCLIPYNVINQSVWECIMPEWLEAIRTEVPDNQLKEFREVLSKMFDIELCPLPFSMEEMFGFISCRFTGYPSSVQEQALLWLHVLSELDIMVPLQLLISMFSDGVNSVKELANQRKSRVSELAGNLASRRVSVASDPGRRVQHNMLSPFHSPFQSPFRSPLRSPFRSPFKNFGHPGGRTIDFDCEDDEMNLNCFILMFDLLLKQMELQDDGITMGLEHSLSKDIISIINNVFQAPWGGSHTCQKDEKAIECNLCQSSILCYQLACELLERLAPKEESRLVEPTDSLEDSLLSSRPEFIIGPEGEEEENPASKHGENPGNCTEPVEHAAVKNDTERKFCYQQLPVTLRLIYTIFQEMAKFEEPDILFNMLNCLKILCLHGECLYIARKDHPQFLAYIQDHMLIASLWRVVKSEFSQLSSLAVPLLLHALSLPHGADIFWTIINGNFNSKDWKMRFEAVEKVAVICRFLDIHSVTKNHLLKYSLAHAFCCFLTAVEDVNPAVATRAGLLLDTIKRPALQGLCLCLDFQFDTVVKDRPTILSKLLLLHFLKQDIPALSWEFFVNRFETLSLEAQLHLDCNKEFPFPTTITAVRTNVANLSDAALWKIKRARFARNRQKSVRSLRDSVKGPVESKRALSLPETLTSKIRQQSPENDNTIKDLLPEDAGIDHQTVHQLITVPMKFMAKDESSAESDISSAKAFNTVKRHLYVLLGYDQQEGCFMIAPQKMRLSTCFNAFIAGIAQVMDYNINLGKHLLPLVVQVLKYCSCPQLRHYFQQPPRCSLWSLKPHIRQMWLKALLVILYKYPYRDCDISKILLHLIHITVNTLNAQYHSCKPHATAGPLYSDNSNISRYS

SEQ ID NO: 3206 - protein, 534 aa, Homo sapiens
MISCAEQRSRQGEAGRGPAPVAPAFLPLWLPRGCSGILSVPAVAMHSAGTPRAESPMSRQEKDAELDRRIVALRKKNQALLRRYQEIQEDRRQAEQGGMAVTTPALLQPDGLTVTISQVPGEKRVVSRNWARGTCGPRVTNEMLEDEDAEDHGGTFCLGELVELAVTMENKAEGKRIVSEKPTRARNQGIEGSPGGRVTRSPPTQVAISSDSARKGSWEPWSRPVGEPPEAGWDYAQWKQEREQIDLARLARHRDAQGDWRRPWDLDKAKSTLQDCSQLRGEGPARAGSRRGPRSHQKLQPPPLLPDGKGRGGQASRPSVAPATGSKARGKERLTGRARRWDMKEDKEELEGQEGSQSTRETPSEEEQAQKQSGMEQGRLGSAPAASPALASPEGPKGESVASTASSVPCSPQEPDLAPLDLSLGGAGIPGPRESGCVLGLRPGAQESPVSWPEGSKQQPLGWSNHQAELEVQTCPEPQRGAGLPEPGEDRSGKSGAQQGLAPRSRPTRGGSQRSRGTAGVRRRTGRPGPAGRC

SEQ ID NO: 3207 - protein, 1375 aa, Homo sapiens [sequence omitted]

SEQ ID NO: 3208 - protein, 1745 aa, Homo sapiens
MKLNPQQAPLYGDCVVTVLLAEEDKAEDDVVFYLVFLGSTLRHCTSTRKVSSDTLETIAPGHDCCETVKVQLCASKEGLPVFVVAEEDFHFVQDEAYDAAQFLATSAGNQQALNFTRFLDQSGPPSGDVNSLDKKLVLAFRHLKLPTEWNVLGTDQSLHDAGPRETLMHFAVRLGLLRLTWFLSQKPGGRGALSIHNQEGATPVSLALERGYHKLHQLLTEENAGEPDSWSSLSYEIPYGDCSVRHHRELDIYTLTSESDSHHEHPFPGDGCTGPIFKLMNIQQQLMKTNLKQMDSLMPLMMTAQDPSSAPETDGQFLPCAPEPTDPQRLSSSEETESTQCCPGSPVAQTESPCDLSSIVEEENTDRSCRKKNKGVERKGEEVEPAPIVDSGTVSDQDSCLQSLPDCGVKGTEGLSSCGNRNEETGTKSSGMPTDQESLSSGDAVLQRDLVTEPGTAQYSSGGELGGISTTNVSTPDTAGEMEHGLMNPDATVRKNVLQGGESTKERFENSNIGTAGASDVHVTSKPVDKISVPNCAPAASSLDGNKPAESSLAFSNEETSTEKTAETETSRSCEESADAPVDQNSVVIPAAAKDKISDGLEPYTLLAAGIGEAMSPSDLALLVLEEDVMPHQNSETNSSHAQSQKGKSSPICSTTGDDKLCADSACQQNTVTSSGDLVAKLCDNIVSESESTTARQPSSQDPPDASHCEDPQAHTVTSDPVRDTQERADFCPFKVVDNKGQRKDVKLDKPLTNMLEVVSHPHPVVPKMEKELVPDQAVISDSTFSLANSPGSESVTKDDALSFVPSQKEKGTATPELHTATDYRDGPDGNSNEPDTRPLEDRAAGLSTSSTAAELQHGMGNTSLTGLGGEHEGPAPPAIPEALNIKGNTDSSLQSMGKATLALDSVLTEEGKLLVVSESSAAQEQDKDKAVTCSSIKENALSSGTLQEEQRTPPPGQDTQQFHEKSISADCAKDKALQLSNSPGASSAFLKAETEHNKEVAPQVSLLTQGGAAQSLVPPGASLATESRQEALGAEHNSSALLPCLLPDGSDGSDALNCSQASPLDVGVKNTQSQGKTSACEVSGNVTVDVTGVNALQGMAEPRRENISHNTQDILIPNVLLSQEKNAVLGLPVALQDKAVTDPQGVGTPEMIPLDWEKGKLEGADHSCTMGDAEEAQIDDEAHPVLLQPVAKELPTDMELSAHDDGAPAGVREVTRAPPSGRERSTPSLPCMVSAQDAPLPKGADLIEEAASRIVDAVIEQVKAAGALLTEGEACHMSLSSPELGPLTKGLESAFTEKVSTFPPGESLPMGSTPEEATGSLAGCFAGREEPEKIILPVQGPEPAAEMPDVKAEDEVDFRASSISEEVAVGSIAATLKMKQGPMTQAINRENWCTIEPCPDAASLLASKQSPECENFLDVGLGRECTSKQGVLKRESGSDSDLFHSPSDDMDSIIFPKPEEEHLACDITGSSSSTDDTASLDRHSSHGSDVSLSQILKPNRSGDRQSLDGFYSHGMGAEGRESESEPADPGDVEEEEMDSITEVPANCSVLRSSMRSLSPFRRHSWGPGKNAASDAEMNHRSFSLEGLTGGAGVGNKPSSSLEVSSANAEELRHPFSGEERVDSLVSLSEEDLESDQREHRMFDQQICHRSKQQGFNYCTSAISSPLTKSISLMTISHPGLDNSRPFHSTFHNTSANLTESITEENYNFLPHSPSKKDSEWKSGTKVSRTFSYIKNKMSSSKKSK

SEQ ID NO: 3209 - protein, 586 aa, Homo sapiens
MKYILVTGGVISGIGKGIIASSIGTILKSCGLRVTAIKIDPYINIDAGTFSPYEHGEVFVLNDGGEVDLDLGNYERFLDINLYKDNNITTGKIYQHVINKERRGDYLGKTVQVVPHITDAVQEWVMNQAKVPVDGNKEEPQICVIELGGTIGDIEGMPFVEAFRQFQFKAKRENFCNIHVSLVPQLSATGEQKTKPTQNSVRALRGLGLSPDLIVCRSSTPIEMAVKEKISMFCHVNPEQVICIHDVSSTYRVPVLLEEQSIVKYFKERLHLPIGDSASNLLFKWRNMADRYERLQKICSIALVGKYTKLRDCYASVFKALEHSALAINHKLNLMYIDSIDLEKITETEDPVKFHEAWQKLCKADGILVPGGFGIRGTLGKLQAISWARTKKIPFLGVCLGMQLAVIEFARNCLNLKDADSTEFRPNAPVPLVIDMPEHNPGNLGGTMRLGIRRTVFKTENSILRKLYGDVPFIEERHRHRFEVNPNLIKQFEQNDLSFVGQDVDGDRMEIIELANHPYFVGVQFHPEFSSRPMKPSPPYLGLLLAATGNLNAYLQQGCKLSSSDRYSDASDDSFSEPRIAELEIS

SEQ ID NO: 3210 - protein, 128 aa, Homo sapiens
MARVHIWPQHTAVNPRLLENQARAMIHHHLMAATPAVFLVSSGPDGSQAKAAAASYLAEPPGSPTPGPFSYTKASVVLFLPNPRPNIFKLHSKEQLAECHQYLQSNMRWDFSFAIKTRMLFLPCSDNV

SEQ ID NO: 3211 - protein, 757 aa, Homo sapiens [sequence omitted]

SEQ ID NO: 3212 - protein, 714 aa, Homo sapiens
MLHLKVQFLDDSQKIFVVDQKSSGKALFNLSCSHLNLAEKEYFGLEFCSHSGNNVWLELLKPITKQVKNPKEIVFKFMVKFFPVDPGHLREELTRYLFTLQIKKDLALGRLPCSDNCTALMVSHILQSELGDFHEETDRKHLAQTRYLPNQDCLEGKIMHFHQKHIGRSPAESDILLLDIARKLDMYGIRPHPASDGEGMQIHLAVAHMGVLVLRGNTKINTFNWAKIRKLSFKRKHFLIKLHANILVLCKDTLEFTMASRDACKAFWKTCVEYHAFFRLSEEPKSKPKTLLCSKGSSFRYSGRTQRQLLEYGRKGRLKSLPFERKHYPSQYHERQCRSSPDLLSDVSKQVEDLRLAYGGGYYQNVNGVHASEPVLESRRRNSALEVTFATELEHSKPEADPTLLHQSQSSSSFPFIYMDPVFNTEPNPNPDPRDIFSERSSLSSFQTSCKFSGNHMSIYSGLTSKVRPAKQLTYTDVPYIPCTGQQVGIMPPQVFFYVDKPPQVPRWSPIRAEERTSPHSYVEPTAMKPAERSPRNIRMKSFQQDLQVLQEAIARTSGRSNINVGLEEEDPNLEDAFVCNIQEQTPKRSQSQSDMKTIRFPFGSEFRPLGPCPALSHKADLFTDMFAEQELPAVLMDQSTAERYVASESSDSESEILKPDYYALYGKEIRSPMARIRLSSGSLQLDEEDEDAYFNTPTAEDRTSLKPCNYFLA

SEQ ID NO: 3213 - protein, 393 aa, Homo sapiens
MEQCACVERELDKVLQKFLTYGQHCERSLEELLHYVGQLRAELASAALQGTPLSATLSLVMSQCCRKIKDTVQKLASDHKDIHSSVSRVGKAIDRNFDSEICGVVSDAVWDAREQQQQILQMAIVEHLYQQGMLSVAEELCQESTLNVDLDFKQPFLELNRILEALHEQDLGPALEWAVSHRQRLLELNSSLEFKLHRLHFIRLLAGGPAKQLEALSYARHFQPFARLHQREIQVMMGSLVYLRLGLEKSPYCHLLDSSHWAEICETFTRDACSLLGLSVESPLSVSFASGCVALPVLMNIKAVIEQRQCTGVWNHKDELPIEIELGMKCWYHSVFACPILRQQTSDSNPPIKLICGHVISRDALNKLINGGKLKCPYCPMEQNPADGKRIIF

SEQ ID NO: 3214 - protein, 161 aa, Homo sapiens
MTGFKASKNRVTLLSDTNTAADLKLKPVLTAHSENLRILKNCAKSTVPMCNKALMAACLFTISFTEYLKPTTENYCSGKKILFKIVLLFDNGPGHPRALMEVCKEMNAVFMPANTTPVLYSMDHRVILTFKSYYLRNKFCKAIAATHSYSCDGSGQSKLKT

SEQ ID NO: 3215 - protein, 352 aa, Homo sapiens
MNTIVFNKLSGAVLFEDGGASERERGGRPYSGVLDSPHARPEVGIPDGPPLKDNLGLRHRRTGARQNGGKVRHKRQALQDMARPLKQWLYKHRDNPYPTKTEKILLALGSQMTLVQVSNWFANARRRLKNTVRQPDLSWALRIKLYNKYVQGNAERLSVSSDDSCSEDGENPPRTHMNEGGYNTPVHHPVIKSENSVIKAGVRPESRASEDYVAPPKYKSSLLNRYLNDSLRHVMATNTTMMGKTRQRNHSGSFSSNEFEEELVSPSSSETEGNFVYRTDTLENGSNKGESAANRKGPSKDDTYWKEINAAMALTNLAQGKDKLQGTTSCIIQKSSHIAEVKTVKVPLVQQF

SEQ ID NO: 3216 - protein, 1284 aa, Homo sapiens
MHVFIVGMSLSSVTLASALQVRGEALSEEEIWSLLFLAAEQLLEDLRNDSSDYVVCPWSALLSAAGSLSFQGRVSHIEAAPFKAPELLQGQSEDEQPDASQPLQLCEPLHSILLTMCEDQPHRRCTLQSVLEACRVHEKEVSVYPAPAGLHIRRLVGLVLGTISEVEKRVVEESSSVQQNRSYLLRKRLRGTSSESPAAQAPECLHPCRVSERSTETQSSPEPHWSTLTHSHCSLLVNRALPGADPQDQQAGRRLSSGSVHSAADSSWPTTPSQRGFLQRRSKFSRPEFILLAGEAPMTLHLPGSVVTKKGKSYLALRDLCVVLLNGQHLEVKCDVESTVGAVFNAVTSFANLEELTYFGLAYMKSKEFFFLDSETRLCKIAPEGWREQPQKTSMNTFTLFLRIKFFVSHYGLLQHSLTRHQFYLQLRKDILEERLYCNEEILLQLGVLALQAEFGNYPKEVESKPYFHVEDYIPASLIERMTALRVQVEVSEMHRLSSALWGEDAELEFLRVTQQLPEYGVLVHQVFSEKRRPEEEMALGICAKGVIVYEVKNNSRIAMLRFQWRETGKISTYQKKFTITSSVTGKKHTFVTDSAKTSKYLLDLCSAQHGFNAQMGSGQPSHVLFDHDKFVQMANLSPAHQARSKPLIWIQRLSCSENELFVSRLQGAAGGLLSTSMDNFNVDGSKEAGAEGIGRSPCTGREQLKSACVIQKPMTWDSLSGPPVQSMHAGSKNNRRKSFIAEPGREIVRVTLKRDPHRGFGFVINEGEYSGQADPGIFISSIIPGGPAEKAKTIKPGGQILALNHISLEGFTFNMAVRMIQNSPDNIELIISQSKGVGGNNPDEEKNGTANSGVSSTDILSFGYQGSLSSHTQDQDRNTEELDMAGVQSLVPRLRHQLSFLPLKGAGSSCPPSPPEISAGEIYFVELVKEDGTLGFSVTGGINTSVPYGGIYVKSIVPGGPAAKEGQILQGDRLLQVDGVILCGLTHKQAVQCLKGPGQVARLVLERRVPRSTQQCPSANDSMGDERTAVSLVTALPGRPSSCVSVTDGPKFEVKLKKNANGLGFSFVQMEKESCSHLKSDLVRIKRLFPGQPAEENGAIAAGDIILAVNGRSTEGLIFQEVLHLLRGAPQEVTLLLCRPPPGALPEMEQEWQTPELSADKEFTRATCTDSCTSPILDQEDSWRDSASPDAGEGLGLRPESSQKAIREAQWGQNRERPWASSLTHSPESHPHLCKLHQERDESTLATSLEKDVRQNCYSVCDIMRLGRYSFSSPLTRLSTDIF

SEQ ID NO: 3217 - protein, 971 aa, Homo sapiens [sequence omitted]

SEQ ID NO: 3218 - protein, 426 aa, Homo sapiens
MLGSFSGTTVPALLNSTSNQLYLHFYSDISVSAAGFHLEYKTVGLSSCPEPAVPSNGVKTGERYLVNDVVSFQCEPGYALQGHAHISCMPGTVRRWNYPPPLCIAQCGGTVEEMEGVILSLGFPGNYPSNMDCSWKIALPVGFGAHIQFLNFSTEPNHDYIEIRNGPYETSRMMGRFSGSELPSSLLSTSHETTVYFHSDHSQNRPGFKLEYQAYELQECPDPEPFANGIVRGAGYNVGQSVTFECLPGYQLTGHPVLTCQHGTNRNWDHPLPKCEVPCGGNITSSNGTVYSPGFPSPYSSSQDCVWLITVPIGHGVRLNLSLLQTEPSGDFITIWDGPQQTAPRLGVFTRSMAKKTVQSSSNQVLLKFHRDAATGGIFAIAFSDHCRYFNQKSGKLDFTPSSTLGQLCKTLHRSLPHLRLQFLHL

SEQ ID NO: 3219 - protein, 292 aa, Homo sapiens [sequence omitted]

SEQ ID NO: 3220 - protein, 1023 aa, Homo sapiens [sequence omitted]

SEQ ID NO: 3221 - protein, 791 aa, Homo sapiens [sequence omitted]

SEQ ID NO: 3222 - protein, 214 aa, Homo sapiens
MRVSMQQTAQGGGPHGQRRDADLRPAPPKLPVQMPLTPSNQQQDRHCVRKVGRHPHPCTAAATPLAPNAKAFKDAAQKHHQQHKGRSQEPELTSLPPSSEVSFPTFSELSVSMASSATSATSPDVLASVSIASSWPSSARCSKPTAVEANVIALPLRRWHRDWQRCHLGVCVLSLRVQASPAPAVVLGPQMRDHGHEDQPPRQPLPSSLGSGVF

SEQ ID NO: 3223 - protein, 155 aa, Homo sapiens
MIFKFPSSFLVLWSLLRCGRKQFVSCAEQFRSPGSLSPGPKPPRRESFSGPWEQVLKGFLLKRGRQPAVRVRIVVVPEPYGQSFERIGLGRFSGQKRLISILGALSHKGYLIERKNGVCGSFAPISKWVDSGCKGIFSHFSQQRKAFSAKILKGE

SEQ ID NO: 3224 - protein, 751 aa, Homo sapiens
MRLKISLLKEPKHQELVSCVGWTTAEELYSCSDDHQIVKWNLLTSETTQIVKLPDDIYPIDFHWFPKSLGVKKQTQAESFVLTSSDGKFHLISKLGRVEKSVEAHCGAVLAGRWNYEGTALVTVGEDGQIKIWSKTGMLRSTLAQQGTPVYSVAWGPDSEKVLYTAGKQLIIKPLQPNAKVLQWKAHDGIILKVDWNSVNDLILSAGEDCKYKVWDSYGRPLYNSQPHEHPITSVAWAPDGELFAVGSFHTLRLCDKTGWSYALEKPNTGSIFNIAWSIDGTQIAGACGNGHVVFAHVVEQHWEWKNFQVTLTKRRAMQVRNVLNDAVDLLEFRDRVIKASLNYAHLVVSTSLQCYVFSTKNWNTPIIFDLKEGTVSLILQAERHFLLVDGSSIYLYSYEGRFISSPKFPGMRTDILNAQTVSLSNDTIAIRDKADEKIIFLFEASTGKPLGDGKFLSHKNEILEIALDQKGLTNDRKIAFIDKNRDLCITSVKRFGKEEQIIKLGTMVHTLAWNDTCNILCGLQDTRFIVWYYPNTVYVDRDILPKTLYERDASEFSKNPHIVSFVGNQVTIRRADGSLVHISIPPYPAILHEYVSSSKWEDAVRLCRFVKEQTMWACLAAMAVANRDMTTAEIAYAAIGEIDKVQYINSIKNLPSKESKMAHILLFSGNIQEAEIVLLQAGLVYQAIQININLYNWERALELAVKYKTHVDTVLAYRQKFLETFGKQETNKRYLHYAEGLQIDWEKIKA

SEQ ID NO: 3225 - protein, 145 aa, Homo sapiens [sequence omitted]

SEQ ID NO: 3226 - protein, 163 aa, Homo sapiens
MAFGEPPSGHSTRHRTLHGLSFHTAMGMAWSLHYQGQGGTLCLVGVSTPSHDKAVLQGLPHFSVNLGVQPSALAGRRGDASCPSSWRSADPTVSPNLGAPGGPNAIDALHGEQLGLFLRTKMGRDPKDVHGLTPALCGPCLAGLPSSHSPQFSCNTAPLKMLS

SEQ ID NO: 3227 - protein, 390 aa, Homo sapiens
MLSFSRDRLPSGRRVSGKCPPPPLGMAVGRGGSGCPEEGSGRKLELLESQLPAERAREEAGPSVRRPRDKLHKPKATQTEVKPSVRFNLRTSKDPEHEGCYLSVGHSQPLEDCSFNMTAKTFFIIHGWTMSGIFENWLHKLVSALHTREKDANVVVVDWLPLAHQLYTDAVNNTRVVGHSIARMLDWLQEKDDFSLGNVHLIGYSLGAHVAGYAGNFVKGTVGRITGLDPAGPMFEGADIHKRLSPDDADFVDVLHTYTRSFGLSIGIQMPVGHIDIYPNGGDFQPGCGLNDVLGSIAYGTITEVVKCEHERAVHLFVDSLVNQDKPSFAFQCTDSNRFKKGICLSCRKNRCNSIGYNAKKMRNKRNSKMYLKTRAGMPFRGNLQSLECP

SEQ ID NO: 3228 - protein, 107 aa, Homo sapiens [sequence omitted]

SEQ ID NO: 3229 - protein, 277 aa, Homo sapiens
MSREFRGHRNCVLTLAYSAPWDLPSTPCAEEAAAGGLLVTGSTDGTAKVWQVASGCCHQTLRGHTGAVLCLVLDTPGHTAFTGSTDATIRAWDILSGEQLRVFREHRGSVICLECSRAAGTLAPGPSTRSLESCGGCSGATHSSSTASRCTARCSTPPRTTAPCASGTCAGSEVPRGPLRPRAASRGSSATRWAAPPRPCSRPDPAGPLQTPAQTPSGSQSAPPCYPRWWRPMAGEGRGARKPGREESPSQASGFSLVARRRWERECSPWGPPPFPF

SEQ ID NO: 3230 - protein, 586 aa, Homo sapiens; identical to SEQ ID NO: 3209

SEQ ID NO: 3231 - protein, 140 aa, Homo sapiens
MNIITSPLPGSPNSLRGSTFMLGSSLEASLGKLQSQPSTSTCSPSPVKVNKVRVSLEARRLRVGVERSHSQSCLVYLSVMKKREETNKMERVEARPSTCFLGELGHSGQHRRVPGLKKIDHQQGQGVVTEKGATPWVNKQ

SEQ ID NO: 3232 - protein, 114 aa, Homo sapiens [sequence omitted]

SEQ ID NO: 3233 - protein, 454 aa, Homo sapiens
MEIHHFLLKKRKQANLAQLLRDSQDRNKHLGEEIKELQQRLGEVQGDNKLLRMTIAKQRLGDEAIGVRHFAAHEREDLVQQLERAKEQIESLEHDLQASVDELQDVKEERSSYQDKVERLNQELNHILSGHENRIIDVDALCMENRYLQERLKQLHEEVNLLKSNIAKYKNALERRKNSKGQGKSSSSALTGVLSAKQVQDLLSEDHGCSLPATPQSISDLKSLATALLETIHEKNMVIQHQRQTNKILGNRVAELEKKLRTLEVSGLWSLPGGKDTILFSDPTLPSGQRSRSPLLKFVEQPTENKADPKDGEAQKQEEDESCAAAEALTAPEDAGRPAVNSPANQSRGNQCKLFHPSLPQLPSEEEVNSLGREIIKLTKEQAAAELEEVRRESPIEGQRSETGPAPPGLAIQGELPKSHLDSFEASRPAAKASTPEDGKGIPEGGGMRSTVKT

SEQ ID NO: 3234 - protein, 278 aa, Homo sapiens
MTDLNKHIKQAQTQRKQLLEESRELHREKLLVQAENRFFLEYLTNKTEEYTEQPEKVWNSYLQKSGEIERRRQESASRYAEQISVLKTALLQKENIQSSLKRKLQAMRDIAILKEKQEKEIQTLQEETKKVQAETASKTREVQAQLLQEKRLLEKQLSEPDRRLLGKRKRRELNMKAQALKLAAKRFIFEYSCGINRENQQFKKELLQLIEQAQKLTATQSHLENRKQQLQQEQWYLESLIQARQRLQGSHNQCLNRQDVPKTTPSLPQGTKSRINPK

SEQ ID NO: 3235 - protein, 112 aa, Homo sapiens [sequence omitted]

SEQ ID NO: 3236 - protein, 655 aa, Homo sapiens [sequence omitted]

SEQ ID NO: 3237 - protein, 608 aa, Homo sapiens [sequence omitted]

SEQ ID NO: 3238 - protein, 510 aa, Homo sapiens
MVARVGLLLRALQLLLWGHLDAQPAERGGQELRKEAEAFLEKYGYLNEQVPKAPTSTRFSDAIRAFQWVSQLPVSGVLDRATLRQMTRPRCGVTDTNSYAAWAERISDLFARHRTKMRRKKRFAKQGNKWYKQHLSYRLVNWPEHLPEPAVRGAVRAAFQLWSNVSALEFWEAPATGPADIRLTFFQGDHNDGLGNAFDGPGGALAHAFLPRRGEAHFDQDERWSLSRRRGRNLFVVLAHEIGHTLGLTHSPAPRALMAPYYKRLGRDALLSWDDVLAVQSLYGKPLGGSVAVQLPGKLFTDFETWDSYSPQGRRPETQGPKYCHSSFDAITVGSHFWEVAADGNVSEPRPLQERWVGLPPNIEAAAVSLNDGDFYFFKGGRCWRFRGPKPVWGLPQLCRAGGLPRHPDAALFFPPLRRLILFKGARYYVLARGGLQVEPYYPRSLQDWGGIPEEVSGALPRPDGSIIFFRDDRYWRLDQAKLQATTSGRWATELPWMGCWHANSGSALF

SEQ ID NO: 3239 - protein, 248 aa, Homo sapiens
MPRIAGNHLMLEESRTCSSPELLDGVWPCQPLHFGLPASEMHFQTMLKSKLNVLTLKKEPLPAVIFHEPEAIELCTTTPLMKTRTHSGCKVTYLGKVSTTGMQFLSGCTEKPVIELWKKHTLAREDVFPANALLEIRPFQVWLHHLDHKGEATVHMDTFQVARIAYCTADHNVSPNIFAWVYREINDDLSYQMDCHAVECESKLEAKKLAHAMMEAFRKTFHSMKSDGRIHSNSSSEEVSQELESDDG

SEQ ID NO: 3240 - protein, 588 aa, Homo sapiens [sequence omitted]

SEQ ID NO: 3241 - protein, 102 aa, Homo sapiens [sequence omitted]

SEQ ID NO: 3242 - protein, 192 aa, Homo sapiens
MERQPGPVRGKLQIFQKTEKDPQARAGSPVQEYHTALVAGDLDHLKPLMDQFFQDANVVFEINKDEMEWQVKSPATFGLSGLWTLEYKRELTTPLCIAAAHGHTACVRHLLGRGADPDASPAGPRVPDRILRSPGLTAAHGAGAAQPRLSHRVARRLPQGAEDLCICPRSHRGAFQLLPSALLVRVLEGSDS

SEQ ID NO: 3243 - protein, 315 aa, Homo sapiens
MMSSVSTESKLQQAVSLQGVDPETCMIVFKNHWAQVVKILEKHDPLKNTQAKYGSIPPDEASAVQNYVEHMLFLLIEEQAKDAAMGPILEFVVSENIMEKLFLWSLRREFTDETKIEQLKMYEMLVTQSHQPLLHHKPILKPLMMLLSSCSGTTTPTVEEKLVVLLNQLCSILAKDPSILELFFHTSEDQGAANFLIFSLLIPFIHREGSVGQQARDALLFIMSLSAENTMVAHHIVENTYFCPVLATGLSGLYSSLPTKLEDEEDDFDSFIAEMPAVETVPSPFVGRDEAAFASRHPVRTQSTPFTGPFISVVL

SEQ ID NO: 3244 - protein, 298 aa, Homo sapiens
MLDGLQRLRSQPKLADVTLLVGGRELPCHRGLLALSSPYFHAMFAGDFAESFSARVELRDVEPAVVGQLVDFVYTGRLTITQGNVEALTRTAARLHFPSVQKVCGRYLQQQLDAANCLGICEFGEQQGLLGVAAKAWAFLRENFEAVAREDEFLQLPRERLVTCLAGDLLQVQPEQGRLEALMRWVRHDPQARAVHLPELLSLVHLDAVPRPCVQQLLASEPLIQESEACRAALSQGHDGAPLALQQKLEEVLVVVGGQALEEEEAGEEPTPGLGNFAFYNSKAKRWMALPDFPDYHK

SEQ ID NO: 3245 - protein, 111 aa, Homo sapiens
MCRCRRYRRRGRVWGGAGDSRAAGNRSGSGAAPGLRWGGVRHWPHLVIPAAHRPQFPRLLNGYAGGATGWIWIRIRGIGIGASCVLGVSCNLELGVARFVPQFPCIVGDGA

SEQ ID NO: 3246 - protein, 676 aa, Homo sapiens [sequence omitted]

SEQ ID NO: 3247 - protein, 103 aa, Homo sapiens
MSSNQCPGVHGSSLAYCSGLHSLGHCCLCRYKKKKKEKQKKEGTAASQNVNQNISLWYWERKRRFPREDEDQTDCRPAISLHCTWIGHLLYAPGKKIQRTMLL

SEQ ID NO: 3248 - protein, 143 aa, Homo sapiens
MADHNPDSDSTPRTLLRRVLDTADPRTPRRPRSARAGARRALLETASPRKLSGQTRTIARGRSHGARVSTQPTDPKGPWLPRGGGLRSSSALEPTLRKSQGRRTDWLLGALPIVCWQIGPYSGQWALGGTDTSDAAEEHPTNW

SEQ ID NO: 3249 - protein, 103 aa, Homo sapiens
MKEKILRAAREKGRATHKGKPISLTADLSTETLQARREWGPIFNILKEKNFQPRISYPAKLSFISEGEIKSFTDKRILRDFVTTRPALQGLLKEALNMERKNW

SEQ ID NO: 3250 - protein, 367 aa, Homo sapiens
MRQKIKEVEEKQPEVKTGFIASFLDFLKSGPKQQFSTLAVRMPNRTRRPGTQMVCTFCPPPLPKPSSTTPTPLVSETGGNSPSDKVDNELKNLEHLSSFSSDEDDPGYSQDAYKSVSTPLTTLDATSDKKKKTEALQVATTSPTANTTGTATTSSTTVGAVKQEPLHSTSYAVNILENISSSESSKPIELDGLPSDQFAKGQDTVAIEGFTDEEDTESGGEGQYRERDEFVVKIEDIETFKEALKTGKEPPAIWKVQKALLQKFVPVIRDGQREFAATNSYLGYFGDAKSKYKRIYVKFIENANKKEYVRVCSKKPRNKPSQTIRTVQAKPSSSSKTSDPLASKTTTTKAPSVKPKVKQPKVKAEPP

SEQ ID NO: 3251 - protein, 1367 aa, Homo sapiens
MGNSDSQYTLQGSKNHSNTITGAKQIPCSLKIRGIHAKEEKSLHGWGHGSNGAGYKSRSLARSCLSHFKSNQPYASRLGGPTCKVSRGVAYSTHRTNAPGKDFQGISAAFSTENGFHSVGHELADNHITSRDCNGHLLNCYGRNESIASTPPGEDRKSPRVLIKTLGKLDGCLRVEFHNGGNPSKVPAEDCSEPVQLLRYSPTLASETSPVPEARRGSSADSLPSHRPSPTDSRLRSSKGSSLSSESSWYDSPWGNAGELSEAEGSFLAPGMPDPSLHASFPPGDAKKPFNQSSSLSSLRELYKDANLGSLSPSGIRLSDEYMGTHASLSNHVSFASDIDVPSRVAHGDPIQYSSFTLPCRKPKAFVEDTAKKDSLKARMRRISDWTGSLSRKKRKLQEPRSKEGSDYFDSRSDGLNTDVQGSSQASAFLWSGGSTQILSQRSESTHAIGSDPLRQNIYENFMRELEMSRTNTENIETSTETAESSSESLSSLEQLDLLFEKEQGVVRKAGWLFFKPLVTVQKERKLELVARRKWKQYWVTLKGCTLLFYETYGKNSMDQSSAPRCALFAEDSIVQSVPEHPKKENVFCLSNSFGDVYLFQATSQTDLENWVTAVHSACASLFAKKHGKEDTLRLLKNQTKNLLQKIDMDSKMKKMAELQLSVVSDPKNRKAIENQIQQWEQNLEKFHMDLFRMRCYLASLQGGELPNPKSLLAAASRPSKLALGRLGILSVSSFHALVCSRDDSALRKRTLSLTQRGRNKKGIFSSLKGLDTLARKGKEKRPSITQVDELLHIYGSTVDGVPRDNAWEIQTYVHFQDNHGVTVGIKPEHRVEDILTLACKMRQLEPSHYGLQLRKLVDDNVEYCIPAPYEYMQQQVYDEIEVFPLNVYDVQLTKTGSVCDFGFAVTAQVDERQHLSRIFISDVLPDGLAYGEGLRKGNEIMTLNGEAVSDLDLKQMEALFSEKSVGLTLIARPPDTKATLCTSWSDSDLFSRDQKSLLPPPNQSQLLEEFLDNFKKNTANDFSNVPDITTGLKRSQTDGTLDQVSHREKMEQTFRSAEQITALCRSFNDSQANGMEGPRENQDPPPRPLARHLSDADRLRKVIQELVDTEKSYVKDLSCLFELYLEPLQNETFLTQDEMESLFGSLPEMLEFQKVFLETLEDGISASSDFNTLETPSQFRKLLFSLGGSFLYYADHFKLYSGFCANHIKVQKVLERAKTDKAFKAFLDARNPTKQHSSTLESYLIKPVQRVLKYPLLLKELVSLTDQESEEHYHLTEALKAMEKVASHINEMQKIYEDYGTVFDRLVAEQSGTEKEVTELSMGELLMHSTVSWLNPFLSLGKARKDLELTVFVFKRAVILVYKENC

SEQ ID NO: 3252 - protein, 238 aa, Homo sapiens
MISSYLVCLFTDTIRYLSLHDNKYIRYFPGHSKRVVALSMSPVDDTFISGSLDKTIRLWDLRSPNCQGLMHLQGKPVCSFDPEGLIFAAGVNSEMVKLYDLRSFDKGPFATFKMQYDRTCEWTGLKFSNDGKLILISTNGSFIRLIDAFKGVVMHTFGGYANSKAVTLEASFTPDSQFIMIGSEDGKIHVWNGESGIKVAVLDGKHTGPITCLQFNPKFMTFASACSNMAFWLPTIDD

SEQ ID NO: 3253 - protein, 119 aa, Homo sapiens [sequence omitted]

SEQ ID NO: 3254 - protein, 881 aa, Homo sapiens
MNYPGRGSPRSPEHNGRGGGGGAWELGSDARPAFGGGVCCFEHLPGGDPDDGDVPLALLRGEPGLHLAPGTDDHNHHLALDPCLSDENYDFSSAESGSSLRYYSEGESGGGGGGSSLSLHPPQQPPLVPTNSGGGGATGGSPGERKRTRLGGPAARHRYEVVTELGPEEVRWFYKEDKKTWKPFIGYDSLRIELAFRTLLQTTGARPQGGDRDGDHVCSPTGPASSSGEDDDEDRACGFCQSTTGHEPEMVELVNIEPVCVRGGLYEVDVTQGECYPVYWNQADKIPVMRGQWFIDGTWQPLEEEESNLIEQEHLNCFRGQQMQENFDIEVSKSIDGKDGSGINYSAVHSFKLSRNHVDWHSVDEVYLYSDATTSKIARTVTQKLGFSKASSSGTRLHRGYVEEATLEDKPSQTTHIVFVVHGIGQKMDQGRIIKNTAMMREAARKIEERHFSNHATHVEFLPVEWRSKLTLDGDTVDSITPDKVRGLRDMLNSSAMDIMYYTSPLYRDELVKGLQQELNRLYSLFCSRNPDFEEKGGKVSIVSHSLGCVITYDIMTGWNPVRLYEQLLQKEEELPDERWMSYEERHLLDELYITKRRLKEIEERLHGLKASSMTQTPALKFKVENFFCMGSPLAVFLALRGIRPGNTGSQDHILPREICNRLLNIFHPTDPVAYRLEPLILKHYSNISPVQIHWYNTSNPLPYEHMKPSFLNPAKEPTSVSENEGISTIPSPVTSPVLSRRHYGESITNIGKASILGAASIGKGLGGMLFSRFGRSSTTQSSETSKDSMEDEKKPVASPSATTVGTQTLPHSSSGFLDSALELDHRIDFELREGLVESRYWSAVTSHTAYWSSLDVALFLLTFMYKHEHDDDAKPNLDPI

SEQ ID NO: 3255 - protein, 141 aa, Homo sapiens
MCAWMIDSFGNEEQRHKFCPPLCTMEKFASYCLTEPGSGSDAASLLTSAKKQGDHYILNGSKAFISGAGESDIYVVMCRTGGPGPKGISCIVVEKGTPGLSFGKKEKKVSGCWTGNNSGYETLPPASPTPALFQKTGLHTC

SEQ ID NO: 3256 - protein, 254 aa, Homo sapiens
MAAVAATAAAKGNGGGGGRAGAGDASGTRKKKGPGPLATAYLVIYNVVMTAGWLVIAVGLVRAYLAKGSYHSLYYSIEKPLKFFQTGALLEILHCAIGIVPSSVVLTSFQVMSRVFLIWAVTHSVKEVQSEDSVLLFVIAWTITEIIRYSFYTFSLLNHLPYLIKWARYTLFIVLYPMGVSGELLTIYAALPFVRQAGLYSISLPNKYNFSFDYYAFLILIMISYIPIFPQLYFHMIHQRRKILSHTEEHKKFE

SEQ ID NO: 3257 - protein, 118 aa, Homo sapiens
MLWSVPGDRAAPGHPPFRSEASHPTQGPSTTSPFSPFLGADPGGSIYRGVPGSLTAGTTEARKSCLAPAQGTQGRLGAPAGSHSPRRQGLVYPCAMSVIGLCAGSVMRSLPGLPRPRR

SEQ ID NO: 3258 - protein, 804 aa, Homo sapiens
MRPVALLLLPSLLALLAHGLSLEAPTVGKGQAPGIEETDGELTAAPTPEQPERGVHFVTTAPTLKLLNHHPLLEEFLQEGLEKGDEELRPALPFQPDPPAPFTPSPLPRLANQDSRPVFTSPTPAMAAVPTQPQSKEGPWSPESESPMLRITAPLPPGPSMAVPTLGPGEIASTTPPSRAWTPTQEGPGDMGRPWVAEVVSQGAGIGIQGTITSSTASGDDEETTTTTTIITTTITTVQTPGPCSWNFSGPEGSLDSPTDLSSPTDVGLDCFFYISVYPGYGVEIKVQNISLREGETVTVEGLGGPDPLPLANQSFLLRGQVIRSPTHQAALRFQSLPPPAGPGTFHFHYQAYLLSCHFPRRPAYGDVTVTSLHPGGSARFHCATGYQLKGARHLTCLNATQPFWDSKEPVCIAACGGVIRNATTGRIVSPGFPGNYSNNLTCHWLLEAPEGQRLHLHFEKVSLAEDDDRLIIRNGDNVEAPPVYDSYEVEYLPIEGLLSSGKHFFVELSTDSSGAAAGMALRYEAFQQGHCYEPFVKYGNFSSSTPTYPVGTTVEFSCDPGYTLEQGSIIIECVDPHDPQWNETEPACRAVCSGEITDSAGVVLSPNWPEPYGRGQDCIWGVHVEEDKRIMLDIRVLRIGPGDVLTFYDGDDLTARVLGQYSGPRSHFKLFTSMADVTIQFQSDPGTSVLGYQQGFVIHFFEVPRNDTCPELPEIPNGWKSPSQPELVHGTVVTYQCYPGYQVVGSSVLMCQWDLTWSEDLPSCQRVTSCHDPGDVEHSRRPYPAPSFPWGPPCNISVTRVLC

SEQ ID NO: 3259 - protein, 327 aa, Homo sapiens
MAEAQSGTGQLQEQKKGLLIAVSVSVDKIISHFGAARNLVQKAQLGDSRLSPDVGHLVLTTLCPALHALVADGLKPFRKDLITGQRRSSPWSVVEASVKPGSSTRSLGTLYSQVSRLAPLSSSRSRFHAFILGLLNTKQLELWFSSLQEDAGSWWEQLTQASRVYASGGTEGFPLSRWAPGRHGTAAEEGAQERPLPTDEMAPGRGLWLGRLFGVPGGPAENENGALKSRRPSSWLPPTVSVLALVKRGAPPEMPSPQELEASAPRMVQTHRAVRALCDHTAARPDQLSFRRGEVLRVITTVDEDWLRCGRDGMEGLVPVGYTSLVL

SEQ ID NO: 3260 - protein, 1076 aa, Homo sapiens
MGILSITDQPPLVQAIFSRDVEEVRSLLSQKENINVLDQERRTPLHAAAYVGDVPILQLLLMSGANVNAKDTLWLTPLHRAAASRNEKVLGLLLAHSADVNARDKLWQTPLHVAAANRATKCAEALAPLLSSLNVADRSGRSALHHAVHSGHLETVNLLLNKGASLNVCDKKERQPLHWAAFLGHLEVLKLLVARGADLGCKDRKGYGLLHTAAASGQIEVVKYLLRMGAEIDEPNAFGNTALHIACYLGQDAVAIELVNAGANVNQPNDKGFTPLHVAAVSTNGALCLELLVNNGADVNYQSKEGKSPLHMAAIHGRFTRSQILIQNGSEIDCADKFGNTPLHVAARYGHELLISTLMTNGADTARRGIHDMFPLHLAVLFGFSDCCRKLLSSGQLYSIVSSLSNEHVLSAGFDINTPDNLGRTCLHAAASGGNVECLNLLLSSGADLRRRDKFGRTPLHYAAANGSYQCAVTLVTAGAGVNEADCKGCSPLHYAAASDTYRRAEPHTPSSHDAEEDEPLKESRRKEAFFCLEFLLDNGADPSLRDRQGYTAVHYAAAYGNRQNLELLLEMSFNCLEDVESTIPVSPLHLAAYNGHCEALKTLAETLVNLDVRDHKGRTALFLATERGSTECVEVLTAHGASALIKERKRKWTPLHAAAASGHTDSLHLLIDSGERADITDVMDAYGQTPLMLAIMNGHVDCVHLLLEKGSTADAADLRGRTALHRGAVTGCEDCLAALLDHDAFVLCRDFKGRTPIHLASACGHTAVLRTLLQAALSTDPLDAGVDYSGYSPMHWASYTGREDCLELLLEHSPFSYLEGNPFTPLHCAVINNQDSTTEMLLGALGAKIVNSRDAKGRTPLHAAAFADNVSGLRMLLQHQAEVNATDHTGRTALMTAAENGQTAAVEFLLYRGKADLTVLDENKNTALHLACSKGHEKCALMILAETQDLGLINATNSALQMPLHIAARNGLASVVQALLSHGATVLAVDEEGHTPALACAPNKDVADCLALILSTMKPFPPKDAVSPFSFSLLKNCSIAAAKTVGGCGALPHGASCPYSQERPGAIGLDGCYSE

SEQ ID NO: 3261 - protein, 124 aa, Homo sapiens
MHSPRTQIIWFCFTKSKCSTCISLFQTEMAIKHVFQKVFAGEKMRKVKESFPDPDLRRKGEDTFCFVAYLLWAKSYYCLREVRLTLAHPWGISCACGGETNQVGNNSFSPYLSSFHVLLWNKSD

SEQ ID NO: 3262 - protein, 116 aa, Homo sapiens
MVLLLFCCCLRRSFVLVALVAQAGVQWRDLSSPQPPPPGFKQFSCLSLPSSWDYRHVPPPHPANFVFLVETGFLHVDQAGLEPPTSGVPPTSAFQSAGITGMSHPANEWFLKQKSQ

SEQ ID NO: 3263 - protein, 115 aa, Homo sapiens [sequence omitted]

SEQ ID NO: 3264 - protein, 244 aa, Homo sapiens
MAPSSESSVPSHSMSSRRDTDSDTQDANDSSCKSSERSLPDCTLHPNSISIDAGPRQAPKIAQIKRNLSYGDNSDPALEASSLPPPDPWLETSSSSPAEPAQPGACRRDGYWFLKLLQAETERLEGWCCQMDKETKENNLSEEVLGKVLSAVGSAQLLMSQKFQQFRGLCEQNLNPDANPRPTAQDLAGFWDLLQLSIEDISMKFDELYHLKANSWQLVETPEKRKVSMEQCGGEVQGQIPGRQ

SEQ ID NO: 3265 - protein, 817 aa, Homo sapiens
MTSAAHSENYSPASMVTEVLWILSDQKECAVECLYNNIVIETLLQPIHNLMKGNEASPNCSETALIHIAGILVRIASVEEGLILLLYGANMNSSEESPTGAHIIAQFSKKLLDEDISIFSGSEMLPVVKGAFISVCRHIYSTCEGLQVLITYNLHESIAKAWKKTSLLSERIPTPVEGSDSVSSVSQESQNIMAWEDNLLDDLLHFAATPKGLLLLQRTGAINECVTFIFNRYAKKLQVSRHKKFGYGVLVTRVASTAAGGIALKKSGFINELITELWSNLEYGRDDVRVTHPRTTPVDPIDRSCQKSFLALVNLLSYPAIYELVRNQDLPNKTEYSLREVPTCVIDIIDRLIILNSEAKIRSLFNYEQSHIFGLRLLSVICCDLDTLLLLEAQYQVSEMLLNAQEENILEISESHRDFIIDGLSVERNHVLVRINLVGGPLERILPPRLLEKSDNPYPWPMFSSYPLPNCYLSDITRNAGIKQDNDLDKLLLCLKISDKQTEWIENCQRQFCKMMKAKPDIISGEALIELLEKFVLHLTESPSECYFPSVEYTATDANVKNESLSSVQQLGIKMTVRYGKFLSLLKDGAENDLTWVLKHCERFLKQQQTSIKSSLLCLQGNYAGHDWFVSSLFMIMLGDKEKTFQFLHQFSRLLTSAFLWLPRLHISSYLPNDTVESGIHPVYFCSTHYIEMLLKAELPLVFSAFHMSGFAPSQICLQWITQCFWNYLDWIEICHYIATCVFLGPDYQVYICIAVFKHLQQDILQHTQAQDLQVFLKEEALHGFRVSDYFEYMEILEQNYRTVLLRDMRNIRLQST

SEQ ID NO: 3266 - protein, 117 aa, Homo sapiens [sequence omitted]

SEQ ID NO: 3267 - protein, 147 aa, Homo sapiens
MFRFHTKKEHTFTIFSGGCLLLHWQAGTEFFLHDKSGGLLVREPMGIFSWKEYSSIPSPNPTVIFITLGQGCIECVCVCVCVCVCVCVRVGVVLGHLWPVTKVTRTICVPAVIACDCGCISSLPRSLVTLSAHQGRELSTDTCQGPL

SEQ ID NO: 3268 - protein, 797 aa, Homo sapiens
MAALAYNLGKREINHYFSVRSAKVLALVAVLLLAACHLASRRYRGNDSCEYLLSSGRFLGEKVWQPHSCMMHKYKISEAKNCLVDKHIAFIGDSRIRQLFYSFVKIINPQFKEEGNKHENIPFEDKTASVKVDFLWHPEVNGSMKQCIKVWTEDSIAKPHVIVAGAATWSIKIHNGSSEALSQYKMNITSIAPLLEKLAKTSDVYWVLQDPVYEDLLSENRKMITNEKIDAYNEAAVSILNSSTRNSKSNVKMFSVSKLIAQETIMESLDGLHLPESSRETTAMILMNVYCNKILKPVDGSCCQPRPPVTLIQKLAACFFTLSIIGYLIFYIIHRNAHRKNKPCTDLESGEEKKNIINTPVSSLEILLQSFCKLGLIMAYFYMCDRANLFMKENKFYTHSSFFIPIIYILVLGVFYNENTKETKVLNREQTDEWKGWMQLVILIYHISGASTFLPVYMHIRVLVAAYLFQTGYGHFSYFWIKGDFGIYRVCQVLFRLNFLVVVLCIVMDRPYQFYYFVPLVTVWFMVIYVTLALWPQIIQKKANGNCFWHFGLLLKLGFLLLFICFLAYSQGAFEKIFSLWPLSKCFELKGNVYEWWFRWRLDRYVVFHGMLFAFIYLALQKRQILSEGKGEPLFSNKISNFLLFISVVSFLTYSIWASSCKNKAECNELHPSVSVVQILAFILIRNIPGYARSVYSSFFAWFGKISLELFICQYHIWLAADTRGILVLIPGNPMLNIIVSTFIFVCVAHEISQITNDLAQIIIPKDNSSLLKRLACIAAFFCGLLILSSIQDKSKH

SEQ ID NO: 3269 - protein, 763 aa, Homo sapiens
MHSSQNVQTQESSSPQSQKFLPAVQSSSFASSTHCQTLQNNITSPDPKSYAERKLDSDVYPSSKQEDGFPMQELQVLQPQASLESSTQRLSDGEINAQESTYKVSKADDRYSQSVIRSNSRLEDQVIGVALQASKKEESVVGSVTQLNQQIGQVNNAATLDLKNSTNLIQTPQIRLNTKDLKQQHPLILKVHESKVQEQHDQIINASSQIQIPNHALGHGHQASLPNTQVLLDSACDLQILQQSILQAGLGQVKASLQAQRVQSPQQIVHPFLQMEGHVIQSNGDHSQQQLHPQNSEVMKMDLSESSKPLQQHLTTKGHFSETNQHDSKNQFVSLGSMCFPEAVLLSDERNILSNVDDILAATAAACGVTPTDFSKSTSNETMQAVEDGDSKSHFQQSLDVRHVTSDFNSMTATVGKPQNINDTSLNGNQVTVNLSPVPALQSKMTLDQQHIETPGQNIPTKVTSAVVGPSHEVQEQSSGPFKKQSATNLESEEDSEAPVDSTLNNNRNQEFVSSSRSISGESATSESEFTLGGDDSGVSMNPARSALALLAMAQSGDAVSVKIEEENQDLMHFNLQKKGAKGKGQVKEEDNSNQKQLKRPAQGKRQNPRGTDIYLPYTPPSSESCHDGYQHQEKMRQKIKEVEEKQPEVKTGFIASFLDFLKSGPKQQFSTLAVRMPNRTRRPGTQMVRTFCPPPLPKPSSTTPTPLVSETGGNSPSDKVDNELKNLEHLSSFSSDEDDPGYSQDAYKSVPTPLTTLDATSE

SEQ ID NO: 3270 - protein, 133 aa, Homo sapiens
MNRHFSKEDIYVANKHIKKSSTLLIIREMQRRTTMRYHLMPVRMVIIKKSKNNRCWRGCGEVGTLLHCWWECKLVQPLWKCVWLFLKDLELEILFVPAIPLLGIYPKEYKPFYYKDTCTFLFIAALFTIAKTQ

SEQ ID NO: 3271 - protein, 110 aa, Homo sapiens
MASTAANLLANYNHSCSSSIRLEKTRFPSGLGAFSSSRETHQPSACVACAPGAFLLIRSMISAWLQGPAKSVREPPNGARSRRISRSETSLSPHLLTGNLGGFQLMFFSP

SEQ ID NO: 3272 - protein, 332 aa, Homo sapiens
MATIKSELIKNFAEEEAIHHNKISIVGTGSVGVACAISILLKGLSDELVLVDVDEGKLKGETMDLQHGSPFMKMPNIVSSKDYLVTANSNLVIITAGARQKKGETRLDLVQRNVSIFKLMIPNITQYSPHCKLLIVTNPVDILTYVAWKLSGFPKNRVIGSGCNLDSARFRYFIGQRLGIHSESCHGLILGEHGDSSVPVWSGVNIAGVPLKDLNPDIGTDKDPEQWENVHKKVISSGYEMVKMKGYTSWGISLSVADLTESILKNLRRVHPVSTLSKGLYGINEDIFLSVPCILGENGITDLIKVKLTLEEEACLQKSAETLWEIQKELKL

SEQ ID NO: 3273 - protein, 188 aa, Homo sapiens
MILTMLLMLKLCTEVRVANELNARRRSFTAADSKDEEVKVAPRRSFLDFDPHHFWQWSSFSDYVQCVLAFTGVAGYITYLSIDSALFVETLGFLAVLTEAMLGVPQLYRNHRHQSTEGMSIKMVLMWTSGDAFKTAYFLLKGAPLQFSVCGLLQVLVDLAILGQAYAFARHPQKPAPHAVHPTGTKAL

SEQ ID NO: 3274 - protein, 106 aa, Homo sapiens [sequence omitted]

SEQ ID NO: 3275 - protein, 113 aa, Homo sapiens [sequence omitted]

SEQ ID NO: 3276 - protein, 197 aa, Homo sapiens [sequence omitted]

SEQ ID NO: 3277 - protein, 157 aa, Homo sapiens
MATVGERRPLPSPEVMLGQSWNLWVEASKLPGKDGTELDESFKEFGKNREVMGLCREDMPIFGFCPAHDDFYLVVCNDCNQVVKPQAFQSHYERRHSSSSKPPLAVPPTSVFSFFPSLSKSKGGSASGSNRSSSGGVLSASSSSSKLLKHPLTKNYS

SEQ ID NO: 3278 - protein, 408 aa, Homo sapiens
MNLPRAERPRSTPQRSLRDSDGEDGKIDVLGEEEDEDEVEDEEEEASQKFLEQSLQPGLQVARWGGVALPREHIEGGGPSDPSEFGTEFRAPPRSAAASEDARQPAKPPYSYIALITMAILQSPHKRLTLSGICAFISGRFPYYRRKFPAWQNSIRHNLSLNDCFVKIPREPGHPGKGTYWSLDPASQDMFDNGSFLRRRKRFKRHQLTPGAHLPHPFPLPAAHAALHNPRPGPLLGAPALPQPVPGAYPNTAPGRRPYALLHPHPPRYLLLSAPAYAGAPKKAEGADLATPGTLPVLQPSLGPQPWEEGKGLASPPGGGCISFSIESIMQGVRGAGTGAAQSLSPTAWSYCPLLQRPSSLSDNFAATAAASGGGLRQRLRSHQGRGAGRAPVGRVGAAAVSGGGRGL

SEQ ID NO: 3279 - protein, 324 aa, Homo sapiens [sequence omitted]

SEQ ID NO: 3280 - protein, 233 aa, Homo sapiens
MFHRTPPRRSFPNPSWKGPGSKGHQSCLSDQLAVSSGCWPETALALSKVTVHCLAIASLSGPALGLVRLLQHPWLFPWQCDYPALTQSKGVPLSWVKFTRRLLKCLLRGNLCLSLSLSLSLSLSLSLSLSLSLSQCISLLSFTFPFFLSKNNVLVEALVTLINQNLPFPVSLFLRPFHPHYLLLPRNMTDHQDAARREDLSQKPTSKMGGRCGLRSSAMHPKPLTFPLWKCTG

SEQ ID NO: 3281 - protein, 176 aa, Homo sapiens
MAAVEKRRQAVPPPAGFTDSGRQSVSRAAGAAESEEDFLRQVGVTEMLRAALLKVLEARPEEPIAFLAHYFENMGLRSPVNGGAGEPPGQLLLQQQRLGRALWHLRLAHHSRRCAVGRLGRVGQRWTSTPSMPRAAPYPQRRRRGPGLAGSCSARCLLGWDGSDKVGWRVRASVRR

SEQ ID NO: 3282 - protein, 924 aa, Homo sapiens
MISQTQSLGGPPLEHEVPGHPPGGDMGQQMNMMIQRLGQDSLTPEQVAWRKLQEEYYEEKRRKEEQIGLHGSRPLQDMMGMGGMMVRGPPPPYHSKPGDQWPPGMGAQLRGPMDVQDPMQLRGGPPFPGPRFPGNQIQRVPGFGGMQSMPMEVPMNAMQRPVRPGMGWTEDLPPMGGPSNFAQNTMPYPGGQGEAERFMTPRVREELLRHQLLEKRSMGMQRPLGMAGSGMGQSMEMERMMQAHRQMDPAMFPGQMAGGEGLAGTPMGMEFGGGRGLLSPPMGQSGLREVDPPMGPGNLNMNMNVNMNMNMNLNVQMTPQQQMLMSQKMRGPGDLMGPQGLSPEEMARVRAQNSSGVMGGPQKMLMPSQFPNQGQQGFSGGQGPYQAMSQDMGNTQDMFSPDQSSMPMSNVGTTRLSHMPLPPASNPPGTVHSAPNRGLGRRPSDLTISINQMGSPGMGHLKSPTLSQVHSPLVTSPSANLKSPQTPSQMVPLPSANPPGPLKSPQVLGSSLSVRSPTGSPSRLKSPSMAVPSPGWVASPKTAMPSPGVSQNKQPPLNMNSSTTLSNMEQGTLPPSGPRSSSSAPPANPPSGLMNPSLPFTSSPDPTPSQNPLSLMMTQMSKYAMPSSTPLYHNAIKTIATSDDELLPDRPLLPPPPPPQGSGPGISNSQPSQMHLNSAAAQSPMGMNLPGQQPLSHEPPPAMLPSPTPLGSNIPLHPNAQGTGGPPQNSMMMAPGGPDSLNAPCGPVPSSSQMMPFPPRLQQPHGAMAPTGGGGGGPGLQQHYPSGMALPPEDLPNQPPGPMPPQQHLMGKAMAGRMGDAYPPGVLPGVASVLNDPELSEVIRPTPTGIPEFDLSRIIPSWFLRTRPFSFCLYLLRILSLLMWLTPLPPLPAGGWPGGQVPAGAVNRALRFCAGLCVCCISVF

SEQ ID NO: 3283 - protein, 428 aa, Homo sapiens
MSSGLRAADFPRWKRHISEQLRRRDRLQRQAFEEIILQYNKLLEKSDLHSVLAQKLQAEKHDVPNRHEIRRRQARLQKELAEAAKEPLPVEQDDDIEVIVDETSDHTEETSPVRAISRAATKRLSQPAGGLLDSITNIFGRRSVSSFPVPQDNVDTHPGSGKEVRVPATALCVFDAHDGEVNAVQFSPGITSIEFDSAGSYLLAASNDFASRIWTVDDYRLRHTLTGHSGKVLSAKFLLDNARIVSGSHDRTLKLWDLRSKVCIKTVFAGSSCNDIVCTEQCVMSGHFDKKIRFWDIRSESIVREMELLGKITALDLNPERTELLSCSRDDLLKVIDLRTNAIKQTFSAPGFKCGSDWTRVVFSPDGSYVAAGSAEGSLYIWSVLTGKVEKVLSKQHSSSINAVAWSPSGSHVVSVDKGCKAVLWAQY

SEQ ID NO: 3284 - protein, 135 aa, Homo sapiens
MRMVPMEMFNYCSQLEDENSSAGLDIPGPPCTKASPEPAKPKPGAQHSLPTEAEAPAGEREASHGHGDHCRGRVRRRLHHDGGGRCLWLHLRLPHGQVPPGAQKAPAPDGGPRGRARGPEADLFCGLSAHPHPAR

SEQ ID NO: 3285 - protein, 104 aa, Homo sapiens
MEHFGSGLMGESPFIFLHLGQLHSKERNKGHVLPKASGLTGQSQPFREGMSPKEGSPFFPEHPPLSAELLLPTHPSTIALSTVCPCQNPSPTCLAWYPSLGGRQ

SEQ ID NO: 3286 - protein, 140 aa, Homo sapiens
MLGISAIGGLCCLHRLYSCIPGEGGRAAKEKSQSQQPALRPSKLCTGGLGSALWARGAGKRAGRGTAATSARAAQEAPPYTALQVPQREQPMLPKHPLHTHQGSWRREVPQGKAPSPRRASGPGLLWLPTAIISIYRAQS

SEQ ID NO: 3287 - protein, 113 aa, Homo sapiens [sequence omitted]

SEQ ID NO: 3288 - protein, 209 aa, Homo sapiens
MKGGAGGARPPPGRPVRSGANAIPGPTARGRCGPPNPPPRPGWGGGAGGDQRLVSLRSDLRQRGRDIMTVGARLRSKAESSLLRRGPRGRGRTEGDEEAAAILEHLEYADEAEAAAESGTSAADERGPGTRGARRVHFALLPERYEPLEEPAPSEQPRKRYRRKLKKYGKNVGKVIIKGCRYVVIGLQGFAAAYSAPFAVATSVVSFVR

SEQ ID NO: 3289 - protein, 107 aa, Homo sapiens
MKAWSNAMWSSGKPQNGVSSWTSCIRVHTPQGLNPCPLSKELGLNAVRDCLFVVIFIERSSFPLPPWLSQLVVIADSFPERTFNRFKKNVLDWVPKKQSLKQGFVCK

SEQ ID NO: 3290 - protein, 357 aa, Homo sapiens
MLQQILHDMYIDPELLAELSDVQKHILFYKMREEQLRRWKERETWEALAQDEGLRPPKTKRAASDKHIQWLLGADGEVWVWIMGEGPGDKPYEEISEELIAERARLQAQREAEELWRQKEAEITKKFRDALANEKARILAEKWKVEMEGRKAAKVLEERIHEEFKRKEEEERKRGEERIRLQEEQRAKELYWTLKQAQLHCQASEKEEREWEEQLRRSKAADEERSRRAQRARDEYRHHSLRAIQKGTVAGLSSMFRELGQSHEQEARLYHHLPDPGLPQPLALPVRTWERPLRPVSRDVIVRWFKEEQLPRRAGFERNTKFIAPWFHGGNYHCFRRRVTSGTLRTEGQPTRLPSVV

SEQ ID NO: 3291 - protein, 158 aa, Homo sapiens
MGEAWFPEVAPSLTSSLGWEWGFLWLCVAPRGAVAPSSFSLFSVGRVVFLMSPNASTWIFQLKMLYSLASFVPLCPFGASLLEFAGGPLLTLFAWVSPAEAAKQQRLLPVLSSRSFDPVGHLSDASQSSPVSGVCRSKLEGISQSVYMGIRDPLEEAD

SEQ ID NO: 3292 - protein, 117 aa, Homo sapiens
MEMIAFARIFCKGQVSTATFLESCGVADLITTCYGGRNRRVAEAFARTGKTIEELEKEMLNGQKLQGPQTSAEVYRILKQKGLLDKFPLFTAVYQICYESRPVQEMLSCLQSHPEHT

SEQ ID NO: 3293 - protein, 111 aa, Homo sapiens [sequence omitted]

SEQ ID NO: 3294 - protein, 103 aa, Homo sapiens [sequence omitted]

SEQ ID NO: 3295 - protein, 111 aa, Homo sapiens [sequence omitted]

SEQ ID NO: 3296 - protein, 144 aa, Homo sapiens [sequence omitted]

SEQ ID NO: 3297 - protein, 319 aa, Homo sapiens [sequence omitted]

SEQ ID NO: 3298 - protein, 118 aa, Homo sapiens [sequence omitted]

SEQ ID NO: 3299 - protein, 159 aa, Homo sapiens [sequence omitted]

SEQ ID NO: 3300 - protein, 461 aa, Homo sapiens [sequence omitted]

SEQ ID NO: 3301 - protein, 154 aa, Homo sapiens [sequence omitted]

SEQ ID NO: 3302 - protein, 183 aa, Homo sapiens [sequence omitted]

SEQ ID NO: 3303 - protein, 650 aa, Homo sapiens
MARSPTTHPPANTYLPQYGGYGAGQSVFAPTKPFTGQDCANSKDCSFAYGSGNSLPASPSSAHSAGYAPPPTGGPCLPPSKASFFSSSEGAPFSGSAPTPLRCDSRASTVSPGGYMVPKGTTASATSAASAASSSSSSFQPSPENCRQFAGASQWPFRQGYGGLDWASEAFSQLYNPSFDCHVSEPNVILDISNYTPQKVKQQTAVSETFSESSSDSTQFNQPVGGGGFRRANSEASSSEGQSSLSSLEKLMMDWNEASSAPGYNWNQSVLFQSSSKPGRGRRKKVDLFEASHLGFPTSASAAASGYPSKRSTGPRQPRGGRGGGACSAKKERGGAAAKAKFIPKPQPVNPLFQDSPDLGLDYYSGDSSMSPLPSQSRAFGVGERDPCDFIGPYSMNPSTPSDGTFGQGFHCDSPSLGAPELDGKHFPPLAHPPTVFDAGLQKAYSPTCSPTLGFKEELRPPPTKLAACEPLKHGLQGASLGHAAAAQAHLSCRDLPLGQPHYDSPSCKGTAYWYPPGSAARSPPYEGKVGTGLLADFLGRTEAACLSAPHLASPPATPKADKEPLEMARPPGPPRGPAAAAAGYGCPLLSDLTLSPVPRDSLLPLQDTAYRYPGFMPQAHPGLGGGPKSGFLGPMAEPHPEDTFTVTSL

SEQ ID NO: 3304 - protein, 893 aa, Homo sapiens
MGRMGKGCPASGPRSWLLSDELVQGSRAGVSASFPVGFREGGGGGDFRRGDVGLQDGGVRVRVIIFAFSLHSLLSRFLPGGDASLMELEKRKENRFVERQSIVPLRLIYRSGGEDESRHDALDTRVRGDLGGRQLTHVDQASFQVDAFGTSFILDVVLNHDLLSSEYIERHIEHGGKTVEVKGGEHCYYQGHIRGNPDSFVALSTCHGLHGMFYDGNHTYLIEPEENDTTQEDFHFHSVYKSRLFEFSLDDLPSEFQQVNITPSKFILKPRPKRSKRQLRRYPRNVEEETKYIELMIVNDHLMFKKHRLSVVHTNTYAKSVVNMADLIYKDQLKTRIVLVAMETWATDNKFAISENPLITLREFMKYRRDFIKEKSDAVHLFSGSQFESSRSGAAYIGGICSLLKGGGVNEFGKTDLMAVTLAQSLAHNIGIISDKRKLASGECKCEDTWSGCIMGDTGYYLPKKFTQCNIEEYHDFLNSGGGACLFNKPSKLLDPPECGNGFIETGEECDCGTPAECVLEGAECCKKCTLTQDSQCSDGLCCKKCKFQPMGTVCREAVNDCDIRETCSGNSSQCAPNIHKMDGYSCDGVQGICFGGRCKTRDRQCKYIWGQKVTASDKYCYEKLNIEGTEKGNCGKDKDTWIQCNKRDVLCGYLLCTNIGNIPRLGELDGEITSTLVVQQGRTLNCSGGHVKLEEDVDLGYVEDGTPCGPQMMCLEHRCLPVASFNFSTCLSSKEGTICSGNGVCSNELKCVCNRHWIGSDCNTYFPHNDDAKTGITLSGNGVAGTNIIIGIIAGTILVLALILGITAWGYKNYREQRQLPQGDYVKKPGGGDSFYSDIPPGVSTNSASSSKKRSNGLSHSWSERIPDTKHISDICENGRPRSNSWQGNLGG

SEQ ID NO: 3305 - protein, 119 aa, Homo sapiens [sequence omitted]

SEQ ID NO: 3306 - protein, 208 aa, Homo sapiens [sequence omitted]

SEQ ID NO: 3307 - protein, 113 aa, Homo sapiens
MLTLHGASSRFPGKSGSRRSSLISQPLWRREYQKQDESQVKSLSLGSPKGQVLTSQRPGPAGPHGSTTPSRCPRPFVSHPAFSRISKDARLDPQSWKTAVPGSHQNGEASSSH

SEQ ID NO: 3308 - protein, 117 aa, Homo sapiens
MKLRCYLKLTAPNRPDSQCPPRTSVPADLASGVTSGEPFKSPHLASHSWPTLCSRANQVANDKRLSWPNSSLAWITPIRCQRCLLRWKNQSGSGVRHQGKQADLEEIKYACSLPIQV

SEQ ID NO: 3309 - protein, 131 aa, Homo sapiens [sequence omitted]

SEQ ID NO: 3310 - protein, 157 aa, Homo sapiens
MLAEWGACLLLAVALLGPGLQAQAMEGVKCGGVLSAPSGNFSSPNFPRLYPYNTECSWLIVVAEGSSVLLTFHAFDLEYHDTCSFDFLEIYNGASPDKGNLLGRFCGKVPPPPFTSSWHVMSVIFHSDKHVASHGFSAGYQKGQRGALGTCCSGSHL

SEQ ID NO: 3311 - protein, 630 aa, Homo sapiens
MKIGQGKYEPGFFPKLQSDVLSTGPASNKWTKRNAPAQWRRKDRQKQHTEHLRLDNDQREKYIQEARTMGSTIRQPKLSNLSPSVIAQTNWKFVEGLLKECRNKTKRMLVEKMGREAVELGHGEVNITGVEENTLIASLCDLLERIWSHGLQVKQGKSALWSHLLHYQDNRQRKLTSGSLSTSGILLDSERRKSDASSLMPPLRISLIQDMRHIQNIGEIKTDVGKARAWVRLSMEKKLLSRHLKQLLSDHELTKKLYKRYAFLRCDDEKEQFLYHLLSFNAVDYFCFTNVFTTILIPYHILIVPSKKLGGSMFTANPWICISGELGETQIMQIPRNVLEMTFECQNLGKLTTVQIGHDNSGLYAKWLVEYVMVRNEITGHTYKFPCGRWLGKGMDDGSLERILVGELLTSQPEVDERPCRTPPLQQSPSVIRRLVTISPNNKPKLNTGQIQESIGEAVNGIVKHFHKPEKERGSLTLLLCGECGLVSALEQAFQHGFKSPRLFKNVFIWDFLEKAQTYYETLEKNEVVPEENWHTRARNFCRFVTAINNTPRNIGKDGKFQMLVCLGARDHLLHHWIALLADCPITAHMYEDVALIKDHTLVNSLIRVLQTLQEFNITLETSLVKGIDI

SEQ ID NO: 3312 - protein, 100 aa, Homo sapiens
MSRLAGGQAPYLWEQGFAQPPWDALGLLTAQDPSREAAWIGGSGLTAGLGLEPSPCPAQAPAEPGALAEAGLGSGAARRPPISHSLGVLRVTQRTVKCWI

SEQ ID NO: 3313 - protein, 635 aa, Homo sapiens [sequence omitted]

SEQ ID NO: 3314 - protein, 114 aa, Homo sapiens
MQGKCFSRTSLLSKGTQQSGCTLCDLPSQHVPPLSPRRERQERVFTVSVSLSHQAGVQWPDLGSLHPLTPWFKQFSCLSLPRSWDSRHAPPLPANFCIFSRDGVSPCWPGWSLS

SEQ ID NO: 3315 - protein, 221 aa, Homo sapiens
MVLDKRAGKKRAARGGFCPRRPQAGGPHGLCPDVLLLHPAAPTTETAPGEGTTLSTGQPVSPGRLLAHHSWGPEEAPAGGGSGPGLSLSLHTDWSPALSPTGTLRGNFSKVLWGQREVVEPARLWEAPEKLPLPTSVLAGFGPWAGPPQAPKGKVVQGKALEAAGIRVGHTEGYQVLWGPWGPALEADRSTGLRMSCCPRTWWSGPGRAAPPPPIPHLVIT

SEQ ID NO: 3316 - protein, 256 aa, Homo sapiens
MGCARRHAGPRGSPVKGSGGLDSLWAWGGVVSLCWLSYRWWPVSPGSGCSHVPAPTLPARDRPHQDPGAAPASARLSPRSQVRPQPLRHASGSSCCTCSSPCASTLLSGFLPLATGRVCVKPQGLQKLEVPLSGRIMHCTRGIKGGDRKNYGCCDTSPTAPRLAATATRRDFSVASRGVGQRWSLVTFSLGPAPGLSSLGNSTSLSTPLEGLTMRGAQTGGITTWFGLYHSPRDKARQTPLHIRSEFELWLHDTDT

SEQ ID NO: 3317 - protein, 639 aa, Homo sapiens
MGPQGARRQAFLAFGDVTVDFTQKEWRLLSPAQRALYREVTLENYSHLVSLGILHSKPELIRRLEQGEVPWGEERRRRPGPCAGIYAEHVLRPKNLGLAHQRQQQLQFSDQSFQSDTAEGQEKEKSTKPMAFSSPPLRHAVSSRRRNSVVEIESSQGQRENPTEIDKVLKGIENSRWGAFKCAERGQDFSRKMMVIIHKKAHSRQKLFTCRECHQGFRDESALLLHQNTHTGEKSYVCSVCGRGFSLKANLLRHQRTHSGEKPFLCKVCGRGYTSKSYLTVHERTHTGEKPYECQECGRRFNDKSSYNKHLKAHSGEKPFVCKECGRGYTNKSYFVVHKRIHSGEKPYRCQECGRGFSNKSHLITHQRTHSGEKPFACRQCKQSFSVKGSLLRHQRTHSGEKPFVCKDCERSFSQKSTLVYHQRTHSGEKPFVCRECGQGFIQKSTLVKHQITHSEEKPFVCKDCGRGFIQKSTFTLHQRTHSEEKPYGCRECGRRFRDKSSYNKHLRAHLGEKRFFCRDCGRGFTLKPNLTIHQRTHSGEKPFVCNVCGQGFSWKRSLTRHHWRIHSKEKPFVCQECKRGYTSKSDLTVHERIHTGERPYECQECGRKFSNKSYYSKHLKRHLREKRFCTGSVGEASS

SEQ ID NO: 3318 - protein, 249 aa, Homo sapiens [sequence omitted]

SEQ ID NO: 3319 - protein, 959 aa, Homo sapiens
MAPYQGPALYVYNNAVFTPEDWHGIQEIARSRKKDDPLKVGRFGIGFNSVYHITDVPCIFSGDQIGMLDPHQTLFGPHESGQCWNLKDDSKEISELSDQFAPFVGIFGSTKETFINGNFPGTFFRFPLRLQPSQLSSNLYNKQKVLELFESFRADADTVLLFLKSVQDVSLYVREADGTEKLVFRVTSSESKALKHERPNSIKILGTAISNYCKKTPSNNITCVTYHVNIVLEEESTKDAQKTSWLVCNSVGGRGISSKLDSLADELKFVPIIGIAMPLSSRDDEAKGATSDFSGKAFCFLPLPPGEESSTGLPVHISGFFGLTDNRRSIKWRELDQWRDPAALWNEFLVMNVVPKAYATLILDSIKRLEMEKSSDFPLSVDVIYKLWPEASKVKVHWQPVLEPLFSELLQNAVIYSISCDWVRLEQVYFSELDENLEYTKTVLNYLQSSGKQIAKVPGNVDAAVQLTAASGTTPVRKVTPAWVRQVLRKCAHLGCAEEKLHLLEFVLSDQAYSELLGLELLPLQNGNFVPFSSSVSDQDVIYITSAEYPRSLFPSLEGRFILDNLKPHLVAALKEAAQTRGRPCTQLQLLNPERFARLIKEVMNTFWPGRELIVQWYPFDENRNHPSVSWLKMVWKNLYIHFSEDLTLFDEMPLIPRTILEEGQTCVELIRLRIPSLVILDDESEAQLPEFLADIVQKLGGFVLKKLDASIQHPLIKKYIHSPLPSAVLQIMEKMPLQKLCNQITSLLPTHKDALRKFLASLTDSSEKEKRIIQELAIFKRINHSSDQGISSYTKLKGCKVLHHTAKLPADLRLSISVIDSSDEATIRLANMLKIEQLKTTSCLKLVLKDIENAFYSHEEVTQLMLWVLENLSSLKNENPNVLEWLTPLKFIQISQEQMVSAGELFDPDIEVLKDLFCNEEGTYFPPSVFTSPDILHSLRQIGLKNEASLKEKDVVQV

SEQ ID NO: 3320 - protein, 121 aa, Homo sapiens [sequence omitted]

SEQ ID NO: 3321 - protein, 1268 aa, Homo sapiens [sequence omitted]

SEQ ID NO: 3322 - protein, 514 aa, Homo sapiens
MEENVFWECKANGRPKPTYKWLKNGEPLLTRDRIQIEQGTLNITIVNLSDAGMYQCLAENKHGVIFSNAELSVIAVGPDFSRTLLKRVTLVKVGGEVVIECKPKASPKPVYTWKKGRDILKENERITISEDGNLRIINVTKSDAGSYTCIATNHFGTASSTGNLVVKDPTRVMVPPSSMDVTVGESIVLPCQVTHDHSLDIVFTWSFNGHLIDFDRDGDHFERVGGDSAGDLMIRNIQLKHAGKYVCMVQTSVDRLSAAADLIVRGPPGPPEAVTIDEITDTTAQLSWRPGPDNHSPITMYVIQARTPFSVGWQAVSTVPELIDGKTFTATVVGLNPWVEYEFRTVAANVIGIGEPSRPSEKRRTEEALPEVTPANVSGGGGSKSELVITWETVPEELQNGRGFGYVVAFRPYGKMIWMLTVLASADASRYVFRNESVHPFSPFEVKVGVFNNKGEGPFSPTTVVYSAEEEPTKPPASIFARSLSATDIEVFWASPLEKNRGRIQGYEVKYWRH

SEQ ID NO: 3323 - protein, 429 aa, Homo sapiens
MLGKRFPNIKVIESGVKQLKSEEHCIVTEDGNQHVYKKLCLCAGAKPKLICEGNPYVLGIRDTDSAQEFQKQLTKAKRIMIIGNGGIALELVYEIEGCEVIWAIKDKAIGNTFFDAGAAEFLTSKLIAEKSEAKIAHKRTRYTTEGRKKEARSKSKADNVGSALGPDWHEGLNLKGTKEFSHKIHLETMCEVKKIYLQDEFRILKKKSFTFPRDHKSVTADTEMWPVYVELTNEKIYGCDFIVSATGVTPNVEPFLHGNSFDLGEDGGLKVDDHMHTSLPDIYAAGDICTTSWQLSPVWQQMRLWTQARQMGWYAAKCMAAASSGDSIDMDFSFELFAHVTKFFNYKVVLLGKYNAQGLGSDHELMLRCTKGREYIKVVMQNGRMMGAVLIGETDLEETFENLILNQMNLSSYGEDLLDPNIDIEDYFD

SEQ ID NO: 3324 - protein, 1130 aa, Homo sapiens [sequence omitted]

SEQ ID NO: 3325 - protein, 196 aa, Homo sapiens [sequence omitted]

SEQ ID NO: 3326 - protein, 144 aa, Homo sapiens [sequence omitted]

SEQ ID NO: 3327 - protein, 184 aa, Homo sapiens
MYFYDGVSRDAASAALADAAEELLDRLASHSMLPSDVSILYHMKTLLLLQDTERLKHALEMFPEHCTMPPGGKSEAQRAWANGTGHTAHQWLHVSSDLGLLLSVFPISMTLTDAGVQGYVHPRPAGAQSTEAWPSEETEGSVGHHDESLVSTRPSCAFLLHGTARVGVPEGPSWPWKVPYSRQE

SEQ ID NO: 3328 - protein, 114 aa, Homo sapiens [sequence omitted]

SEQ ID NO: 3329 - protein, 326 aa, Homo sapiens
MKCTAVLCCRMAPLQKAQIVRMVKNLKGSPITLSIGDGANDVSMILESHVGIGIKGKEGRQAARNSDYSVPKFKHLKKLLLAHGHLYYVRIAHLVQYFFYKNLCFILPQFLYQFFCGFSQQPLYDAAYLTMYNICFTSLPILAYSLLEQHINIDTLTSDPRLYMKISGNAMLQLGPFLYWTFLAAFEGTVFFFGTYFLFQTASLEENGKVYGNWTFGTIVFTVLVFTVTLKLALDTRFWTWINHFVIWGSLAFYVFFSFFWGGIIWPFLKQQRMYFVFAQMLSSVSTWLAIILLIFISLFPEILLIVLKNVRRRSARVHHLISSSA

SEQ ID NO: 3330 - protein, 913 aa, Homo sapiens
MPGEAVEYHSIQLIRDEFLMNVQKFASNIQRTMQQLEGEIKLEMPIISVEGEVSDLAADPETVDILEQCVINWLNQISTAVEAQLKKTPQGKGPLAEIEFWRERNATLSALHEQTKLPIVRKVLDVIKESDSMLVANLQPVFTELFKFHTEASDNVRFLSTVERYFKNITHGSGFHVVLDTIPAMMSALRMVWIISRHYNKDERMIPLMERIAWEIAERVCRVVNLRTLFKENRASAQSKTLEARNTLRLWKKAYFDTRAKIEASGREDRWEFDRKRLFERTDYMATICQDLSDVLQVLEEFYNIFGPELKAVTGDPKRIDDVLCRVDGLVTPMENLTFDPFSIKSSQFWKYVMDEFKIEVLIDIINKIFVQNLENPPLYKNHPPVAGAIYWERSLFFRIKHTILRFQEVQEILDSDRGQEVKQKYLEVGRTMKEYEDRKYEQWMEVTEQVLPALMKKSLLTKSSIATEEPSTLERGAVFAINFSPALREIINETKYLEQLGFTVPELARNVALQEDKFLRYTAGIQRMLDHYHMLIGTLNDAESVLLKDHSQELLRVFRSGYKRLNWNSLGIGDYITGCKQAIGKFESLVHQIHKNADDISSRLTLIEAINLFKYPAAKSEEELPGVKEFFEHIERERASDVDHMVRWYLAIGPLLTKVEGLVVHTNTGKAPKLASYYKYWEKKIYEVLTKLILKNLQSFNSLILGNVPLFHTETILTAPEIILHPNTNEIDKMCFHCVRNCVEITKHFVRWMNGSCIECPPQKGEEEEVVIINFYNDISLNPQIIEQAVMIPQNVHRILINLMKYLQKWKRYRPLWKLDKAIVMEKFAAKKPPCVAYDEKLQFYSKIAYEVMRHPLIKDEHCIRLQLRHLANTVQENAKSWVISLGKLLNESAKEELYNLHEEMEVLNRCV

SEQ ID NO: 3331 - protein, 166 aa, Homo sapiens
MLLPFIRTLPLLCYNHLLVSPDSATLSPPYSLEKMTDLVAVWDVALSDGVHKIEFEHGTTSGKRVVYVDGKEEIRKEWMFKLVGKETFYVGAAKTKATINIDAISGFAYEYTLEINGKSLKKYMEDRSKTTNTWVLHMDGENFRIVLEKDAMDVWCNGKKLETAVS

SEQ ID NO: 3332 - protein, 129 aa, Homo sapiens [sequence omitted]

SEQ ID NO: 3333 - protein, 116 aa, Homo sapiens [sequence omitted]

SEQ ID NO: 3334 - protein, 168 aa, Homo sapiens
MANRDSASPHSPPRRRRCLGGPTVLPLRKIHAGCYGPQPPHRHPRPLHTVSLPSPNTLLPQPGDPWMEDWASQSGRQDQRVCEHTCVPADMPQDPRDAPAPVTWCQSYLGNWPFWFRVNWEVKPLGFVEKRTVREMLCHLVRKTFFLSSKIMMGFFWICFTNKSDWSI

SEQ ID NO: 3335 - protein, 343 aa, Homo sapiens
MVTGRREDVATARREIISAAEHFSMIRASRNKSGAAFGVAPALPGQVTIRVRVPYRVVGLVVGPKGATIKRIQQQTNTYIITPSRDRDPVFEITGAPGNVERAREEIETHIAVRTGKILEYNNENDFLAGSPDAAIDSRYSDAWRVHQPGCKPLSTFRQNSLGCIGECGVDSGFEAPRLGEQGGDFGYGGYLFPGYGVGKQDVYYGVAETSPPLWAGQENATPTSVLFSSASSSSSSSAKARAGPPGAHRSPATSAGPELAGLPRRPPGEPLQGFSKLGGGGLRSPGGGRDCMVCFESEVTAALVPCGHNLFCMECAVRICERTDPECPVCHITATQAIRIFS

SEQ ID NO: 3336 - protein, 125 aa, Homo sapiens
MDAAVTDDFQQILPIEQLRSTHASNDYVERPPAPCKQALSSPSLIVQTHKSDWSLATMPTSLPRSLSQCHQLQPLPQHLSQSSIASSMSHSTTASSTTAPLMMKTTVLMSPALVGLVLALSAGQP

SEQ ID NO: 3337 - protein, 148 aa, Homo sapiens [sequence omitted]

SEQ ID NO: 3338 - protein, 172 aa, Homo sapiens
MNAVGCCGLQLYKFGETVSIVFWTDTWRPESFFDKVKKNRQNGMHTLCLLDIKVKEQSLENLIKGRKIYEPPRYMSVNQAAQQLLEIVQNQRIRGEEPAVTEETLCVGLARVGADDQKIAAGTLRQMCTVDLGEPLHSLIITGGSIHPMEMEMLSLFSIPENSSESQSINGL

SEQ ID NO: 3339 - protein, 135 aa, Homo sapiens [sequence omitted]

SEQ ID NO: 3340 - protein, 477 aa, Homo sapiens [sequence omitted]

SEQ ID NO: 3341 - protein, 181 aa, Homo sapiens [sequence omitted]

SEQ ID NO: 3342 - protein, 117 aa, Homo sapiens
MEFHHVGQAGLELLTSSDLPASASQSAGITGMSHCAWTIFTFFFETESCSVTQTEVQWRRLGSLQAPLPGFTPFSCLSLPNSWDYRRPPPFLANFFVFLVAMGFHHVSQDGLDILTS

SEQ ID NO: 3343 - protein, 128 aa, Homo sapiens [sequence omitted]

SEQ ID NO: 3344 - protein, 752 aa, Homo sapiens [sequence omitted]

SEQ ID NO: 3345 - protein, 805 aa, Homo sapiens
MARLHEHLKYFVNMKISTDKSWQGVTIYFSGHETPGEGEHKIMEFIRSEKAKPDHDPNTRHCLYGLDADLIMLGLTSHEAHFSLLREEVRFGGKKTQRVCAPEETTFHLLHLSLMREYIDYEFSVLKEKITFKYDIERIIDDWILMGFLVGNDFIPHLPHLHINHDALPLLYGTYVTILPELGGYINESGHLNLPRFEKYLVKLSDFDREHFSEVFVDLKWFESKVGNKYLNEAAGVAAEEARNYKEKKKLKGQENSLCWTALDKNEGEMITSKDNLEDETEDDDLFETEFRQYKRTYYMTKMGVDVVSDDFLADQAACYVQAIQWILHYYYHGVQSWSWYYPYHYAPFLSDIHNISTLKIHFELGKPFKPFEQLLAVLPAASKNLLPACYQHLMTNEDSPIIEYYPPDFKTDLNGKQQEWEAVVLIPFIDEKRLLEAMETCNHSLKKEERKRNQHSECLMCWYDRDTEFIYPSPWPEKFPAIERCCTRYKIISLDAWRVDINKNKITRIDQKALYFCGFPTLKHIRHKFFLKKSGVQVFQQSSRGENMMLEILVDAESDELTVENVASSVLGKSVFVNWPHLEEARVVAVSDGETKFYLEEPPGTQKLYSGRTAPPSKVVHLGDKEQSNWAKEVQGISEHYLRRKGIIINETSAVVYAQLLTGRKYQINQNGEVRLEKQWSKQVVPFVYQTIVKDIRAFDSRFSNIKTLDDLFPLRSMVFMLGTPYYGCTGEVQDSGDVITEGRIRVIFSIPCEPNLDALIQNQHKYSIKYNPGYVLASRLGVSGYLVSRFTGSIFIGRGSRRK

SEQ ID NO: 3346 - protein, 108 aa, Homo sapiens
MYVVFYADRIIQKNALKSFALVAQAGVQWCDPGSLQPLPPGLKRFSCLSLLSSWDYRRIPWEHPPAEICTSATILSGRRKGKGSAASLATACIISSQRRSTGSGSFRA

SEQ ID NO: 3347 - protein, 130 aa, Homo sapiens
MPVIPATREAEARESLDSKHSFIHIPIHPYTYSSNSCSSKHPSIHPSIHPSIHPSIYTSIYPFMHLYIYLLIKFLSIHPSTYLSNFCSSKHPPIHLSTHPSIHACMHPSIHTYIHSLIRLYTHPSMYLFI

SEQ ID NO: 3348 - protein, 153 aa, Homo sapiens [sequence omitted]

SEQ ID NO: 3349 - protein, 120 aa, Homo sapiens
MEIDGFQQLDLEKSVPSKKTTPKRIIHFVDGDIMEEYSTEEEEEEEKEEQSTNSTLDPSKLSWGPYLRFWAGRIASTSFSMLSLQATLLLKAEKEGLKQLLRSLSGCMEEFLMWVLVTLD

SEQ ID NO: 3350 - protein, 120 aa, Homo sapiens [sequence omitted]

SEQ ID NO: 3351 - protein, 862 aa, Homo sapiens
MWQLLPVEQDTSNVTEMKVSEKSHNAFKATNKKRETDVHLKSQDFLMKTNTSTGLKMAMERSLNPINFNPENNVKESECPLPPPSPPPPPPSNASSEIEFPLPPPPPLMMFPEKNGFLPSLSTEKIKAEFESFPGLPLPPPPVDEKSERESSSMFLPPPPPPTPSQKPAHLLSSSAPEKHSGDFMQQYSQKEASNSQNSQAKIITGKTGVLPPPTLPKPKLPKHIKDNKNDFSPKVELATSLSDMECKITTSKDQKKVMVMTSSEHTETKQNVISKSLDERKQLSIDSANCLSHTVPGTSAPRKKQIAPLIKSHSFPESSGQQNPKPYMRKFKTPLMIAEEKYRQQKEEIEKQKQESSYYNIVKTQSQNQHITEVEKEMPLQKTNEEVSLSGIDSECTVVQPSPGSQSNARILGVCSDNQLSTTSPETVAAKRLHHVLAASEDKDKMKKEVLQSSRDIMQSKSACEIKQSHQECSTQQTQQKKYLEQLHLPQSKPISPNFKVKTIKLPTLDHTLNETDHSYESHKQQSEIDVQTFTKKQYLKTKKTEASTECSHKQSLAERHYQLPKKEKRVTVQLPTESIQKNQEDKLKMVPRKQREFSGSDRGKLPGSEEKNQGPSMIGRKEERLITERKHEHLKNKSAPKVVKQKVIDAHLDSQTQNFQQTQIQTAESKAEHKKLPQPYNSLQEEKCLEVKGIQEKQVFSNTKDSKQEITQNKSFFSSVKESQRDDGKGALNIVEFLRKREELQQILSRVKQFEAEPNKSGLKTFQTLLNTIPGWLISEDKREYAVHIAMENNLEKVKEEITHIKTQAEDMLVSYENIIQTAMMSSKTGKPGNKPTSLDETSSKVSNVHVSNNKNSEQK

SEQ ID NO: 3352 - protein, 198 aa, Homo sapiens
MNFVLVKVRYDVVGMFWNMFFQVASGGGGVGDGVQEPTTGNWRGMLKTSKAEELLAEEKSKPIPIMPASPQKKKKIKQHPDRYTYSFRLTDLSCIYGVVMRFRTYTYFVKIPQMILGMNDYIINFKMYLEILKTSSPVSNRQHIYIADITFFSVYDQVFMKDYWQGKYEYVNFSLWHQFTKEQQAHQLMSNIKTPTSV

SEQ ID NO: 3353 - protein, 114 aa, Homo sapiens [sequence omitted]

SEQ ID NO: 3354 - protein, 105 aa, Homo sapiens [sequence omitted]

SEQ ID NO: 3355 - protein, 250 aa, Homo sapiens
MPLDKMVDLSGSQLRRFPLHVCSFRELVKLYLSDNHLNSLPPELGQLQNLQILALDFNNFKALPQVVCTLKQLCILYLGNNKLCDLPSELSLLQNLRTLWIEANCLTQLPDVVCELSLLKTLHAGSNALRLLPGQLRRLQELRTIWLSGNRLTDFPTVLLHMPFLEVIDVDWNSIRYFPSLAHLSSLKLVIYDHNPCRNAPKVAKGVRRVGRWAEETPEPDPRKARRYALVREESQELQAPVPLLPPTNS

SEQ ID NO: 3356 - protein, 106 aa, Homo sapiens
MTSVAHMSTFRPHICHLSKTSPHPLVTRKRASSPHVVIVLTSGLKGKASLRLRPHLPVIFHPIPLPRLLGLSSCSIPPFAVSVPPFPPGSSSSAMCSLPFLLKRKT

SEQ ID NO: 3357 - protein, 214 aa, Homo sapiens
MNNETTTLISLKEAMKRVDHKLQALETQFKELDFTKDNLMQKFEHHSKALASQAAQDEMWTAVRALQLTSMELNILYSYVIEVLICLHTRVLEKLPDLVRGLPTLASVLRRKVKNKRVRVVWESILEECGLQEGDITALCTFFIARGNKAEHYTAKVRQMYIRDVTFLITNMVKNQALQDSLLRAVQVIEKGKAVRTPEKQKSSLEELIPSVKN

SEQ ID NO: 3358 - protein, 111 aa, Homo sapiens [sequence omitted]

SEQ ID NO: 3359 - protein, 111 aa, Homo sapiens
MGKRDNRVAYMNPIAMARSRGPIQSSGPTIQDYLNRPRPTWEEVKEQLEKKKKGSKALAEFEEKMNENWKKELEKHREKLLSGSESSSKKRQRKKKEKKKSGRVSKNFPFF

SEQ ID NO: 3360 - protein, 290 aa, Homo sapiens [sequence omitted]

SEQ ID NO: 3361 - protein, 142 aa, Homo sapiens
MAAARTPPGQQPRLTSPPPPSISPAAWRWEAAPRGHGPSPKAHTPAFRRHPPLTTAREVARVRTLHPQDVALAGPPGSGCLRWVWDLSCGVFDGGWLGREASSVGRGPRGPGAAVVKMRRHGGRGKAPLPSSTPAPGDCFLY

SEQ ID NO: 3362 - protein, 153 aa, Homo sapiens [sequence omitted]

SEQ ID NO: 3363 - protein, 118 aa, Homo sapiens [sequence omitted]

SEQ ID NO: 3364 - protein, 142 aa, Homo sapiens
MWSLPHPTWTLDSTCYAAAPAWASFSPRTDSDIPHCSTTLHGHPPHPAWALTPYSRPPPAMSGHPPHPSWACKLHITCPHAWIPFSPHMASDTPPWTAILQGSTSSPAQACWPPAWMLFFTGPALTPPGASCAGVFLTLLGL

SEQ ID NO: 3365 - protein, 121 aa, Homo sapiens [sequence omitted]

SEQ ID NO: 3366 - protein, 100 aa, Homo sapiens
MPQTKDEGGGRWGVGGLSNKVWCCRTFSFFFFFFFFFLFFFFFFVVVVVVVFVFIFFFLLSSSFFLLPSSSFFLLLVSLCYPAWSALRQSQLTATSTCQV

SEQ ID NO: 3367 - protein, 157 aa, Homo sapiens [sequence omitted]

SEQ ID NO: 3368 - protein, 342 aa, Homo sapiens
MNPSEMQGKAPPQRQRTRNRTSLTRRVNKMVISEEQMKLPSTKKAGPPTWAQLKKLTQLAEKSLENTRVTQTPENKLLAALMIVSTVVSLPMSAGAATANYTYWAYVPFPPLIRAVTWIDNPIEVYVNNSAWVPGPTDDRGPAQPEEEGMMINISIGYHYPSICLGKTPGCLMPTIQNWLVEEPTVSATSKFTYHMISGMSLGSQMNNLQNSSYQRSLKFRPKWKPCQKEIPEESKDPEVLVWEECVADTAVVLQNNKFRIIIDWAPRGQLYYDCMGQTHSCSQAPSVWPTNLAYDGDLTKRLDQVYRRLESPYSWKWGEKGIPSPRPKLVSPVVGPEHPEL

SEQ ID NO: 3369 - protein, 377 aa, Homo sapiens
MPRRLQPRGAGTKGPPAPAPAASGAARNSHSAASRDPPASAKPLLRWDEVPDDFVECFILSGYRRLPCTAQECLASVLKPTNETLNFWTHFIPLLLFLSKFCRLFFLSGGDVPFHHPWLLPLWCYASGVLLTFAMSCTAHVFSCLSLRLRAAFFYLDYASISYYGFGSTVAYYYYLLPGLSLLDARVMTPYLQQRLGWHVDCTRLIAAYRALVLPVAFVLAVACTVACCKSRTDWCTYPFALRTFVFVMPLSMACPIMLESWLFDLRGENPTLFVHFYRRYFWLVVAAFFNVSKIPERIQPGLFDIIGHSHQLFHIFTFLSIYDQVYYVEEGLRQFLQAPPAAPTFSGTVGYMLLLVVCLGLVIRKFLNSSEFCSKK

SEQ ID NO: 3370 - protein, 193 aa, Homo sapiens [sequence omitted]

SEQ ID NO: 3371 - protein, 124 aa, Homo sapiens [sequence omitted]

SEQ ID NO: 3372 - protein, 515 aa, Homo sapiens
MLMHWGWFLEHDLDHTVPALSTARFSDGRPCNSVCTNDPPCFPMNTRHADPRGTHAPCMLFARSSPACASGRPSATVDSVYAREQINQQTAYIDGSNVYGSSERESQALRDPSVPRGLLKTGFPWPPSGKPLLPFSTGPPTECARQEQESPCFLAGDHRANEHLALAAMHTLWFREHNRVATELSALNPHWEGNTVYQEARKIVGAELQHITYSHWLPKVLGDPGTRMLRGYRGYNPNVNAGIINSFATAAFRFGHTLINPILYRLNATLGEISEGHLPFHKALFSPSRIIKEGGIDPVLRGLFGVAAKWRAPSYLLSPELTQRLFSAAYSAAVDSAATIIQRGRDHGIPPYVDFRVFCNLTSVKNFEDLQNEIKDSEIRQKLRKLYGSPGDIDLWPALMVEDLIPGTRVGPTLMCLFVTQFQRLRDGDRFWYENPGVFTPAQLTQLKQASLSRVLCDNGDSIQQVQADVFVKAEYPQDYLNCSEIPKVDLRVWQDCCADKQAGGTPEAGRVYRC

SEQ ID NO: 3373 - protein, 166 aa, Homo sapiens [sequence omitted]

SEQ ID NO: 3374 - protein, 868 aa, Homo sapiens [sequence omitted]

SEQ ID NO: 3375 - protein, 166 aa, Homo sapiens
MSVPHAHTQSCNDNGKKCLLTLPNVPSGGKLPLVENHCSIPFHQLRDPPPSLRHLQDLVLFWSGPLQTLNHQPAAFVVLDVSANFAGHTGVPKEVKVIILGREGEGSKRGRMRFLGRGGVKLVPVLCYCLLPSYLNLKELPHLQQDLLGIGVLLLAINSCLQGKGG

SEQ ID NO: 3376 - protein, 559 aa, Homo sapiens
MAGLTAAAPRPGVLLLLLSILHPSRPGGVPGAIPGGVPGGVFYPALGPGGKPLKPVPGGLAGAGLGAGLGAFPAVTFPGALVPGGVADAAAAYKAAKAGAGLGGVPGVGGLGVSAAPSVPGAVVPQPGAGVKPGKVPGVGLPGVYPGGVLPGARFPGVGVLPGVPTGAGVKPKAPGVGGAFAGIPGVGPFGGPQPGVPLGYPIKAPKLPGGYGLPYTTGKLPYGYGPGGVAGAAGKAGYPTGTGVGPQAAAAAAAKAAAKFGAGAAGVLPGVGGAGVPGVPGAIPGIGGIAGVGTPAAAAAAAAAAKAAKYGAAAGLVPGGPGFGPGVVGVPGAGVPGVGVPGAGIPVVPGAGIPGAAVPGVVSPEAAAKAAAKAAKYGARPGVGVGGIPTYGVGAGGFPGFGVGVGGIPGVAGVPGVGGSRSRRCPGSWHFPRSSGSSCRQGCQVRVSSWCRRGSWSWRGSWCRCGSWSWLGSWSWRGSWSWCGSWRWRGSRHWPWWSCSCSKIRCQGGCQSPAPSCSWAWCWHPWTWSWCRRPWTWSWCWCSWTWSWCWCSWLRGST

SEQ ID NO: 3377 - protein, 190 aa, Homo sapiens [sequence omitted]

SEQ ID NO: 3378 - protein, 166 aa, Homo sapiens [sequence omitted]

SEQ ID NO: 3379 - protein, 538 aa, Homo sapiens
MGLLLLVLILTPSLAAYRHPDFPLLEKAQQLLQSTGSPYSTNCWLCTSSSTETPGTAYPASPREWTSIEAELHISYRWDPNLKGLMRPANSLLSTVKQDFPDIRQKPPIFGPIFTNINLMGIAPICVMAKRKNGTNVGTLPSTVCNVTFTVDSNQQTYQTYTHNQFRHQPRFPKPPNITFPQGTLLDKSSRFCQGRPSSCSTRNFWFRPADYNQCLQISNLSSTAEWVLLDQTRNSLFWENKTKGANQSQTPCVQVLAGMTIATSYLGISAVSEFFGTSLTPLFHFHISTCLKTQGAFYICGQSIHQCLPSNWTGTCTIGYVTPDIFIAPGNLSLPIPIYGNSPLPRVRRAIHFIPLLAGLGILAGTGTGIAGITKASLTYSQLSKEIANNIDTMAKALTTMQEQIDSLAAVVLQNRRGLDMLTAAQGGICLALDEKCCFWVNQSGKVQDNIRQLLNQASSLRERATQGWLNWEGTWKWFSWVLPLTGPLVSLLLLLLFGPCLLNLITQFVSSRLQAIKLQTNLSAGRHPRNIQESPF

SEQ ID NO: 3380 - protein, 247 aa, Homo sapiens [sequence omitted]

SEQ ID NO: 3381 - protein, 275 aa, Homo sapiens
MEEVREGHALGGGMEADGPASLQELPPSPRSPSPPPSPPPLPSPPSLPSPAAPEAPELPEPAQPSEAHARQLLLEEWGPLSGGLELPQRLTWKLLLLRRPLYRNLLRSPNPEGINIYEPAPPTGPTQRPLETLGNFRGWYIRTEKLQQNQSWTVKQQCVDLLAEGLWEELLDDEQPAITVMDWFEDSRLDACVYELHVWLLAADRRTVIAQHHVAPRTSGRGPPGRWVQVSHVFRHYGPGVRFIHFLHKAKNRMEPGGLRRTRVTDSSVSVQLRE

SEQ ID NO: 3382 - protein, 452 aa, Homo sapiens
MKVQPSVTCVASWGGIVHLEAFGDPVIVLRGAWAVPRVDCLIDTLRTPNASCMRKGTHLLVPCLEEEELALHRRRLDMSEALPCPGKETPTPGCRLGALYWACVHNDPTQLQAILDGGVSPEEATQVDSNGRTGLMVACFHGFQSVVALLSHCPFLDVNQQDKGGDTALMLAAQAGHVPLVSLLLNYYVGLDLERRDQRGLTALMKAAMRNRCADLTAVDPVRGKTALEWAVLTDSFDTVWRIRQLLRRPQVEQLSRHYKPEWPALSGLVAQAQAQAQVAPSLLERLQATLSLPFAPSPQEGGVLDHLVTATTSLASPFVTTACHTLCPDHPPSLGTRSKSVPELLGTAPPPPLVPQSPPGSPQRSPWVFVPYQSPQGILSKCLQWLQPRDSTSPRPQVPKILLSKASSSSHQCQPKPSPSGHQSLALPLWRYQELRIEKRKQEEEARMAQK

SEQ ID NO: 3383 - protein, 409 aa, Homo sapiens
MVELFIFLFLLGETPFKVVVKSLSPKELVRIHVPKPLDRNDGTFLMRYRMYETVDEGLKIEVLYGDEHVAQSPYILKGPVYHEYCECPEDPQAWQKTLSCPTKEPQIAKDFASFPSINLQQMLKEVPKRFGDERGAIVHYTILNNHVYRRSLGKYTDFKMFSDEILLSLTRKVLLPDLEFYVNLGDWPLEHRKVNGTPSPIPIISWCGSLDSRDVVLPTYDITHSMLEAMRGVTNDLLSIQGNTGPSWINKTERAFFRGRDSREERLQLVQLSKENPQLLDAGITGYFFFQEKEKELGKAKLMGFFDFFKYKYQVNVDGTVAAYRYPYLMLGDSLVLKQDSPYYEHFYMALEPWKHYVPIKRNLSDLLEKVKWAKSFTLSPRLECSGTISTHCNLCLPGSRNFVPQPPE

SEQ ID NO: 3384 - protein, 154 aa, Homo sapiens
MRKPREMRGLAQGRGVHSQLCLLLTQNKDLGTPRGSWPSGMDSWHLRASRLQPSGSHGCPKSSGPLLGSWLGCLALPDRRLLGSCLLGDASCRSWCGGGQGGGGFFLSLSLSSTFSPLPRGNGSRISFKRMLLYFASGWKVAVLAPVSCTWTPV

SEQ ID NO: 3385 - protein, 141 aa, Homo sapiens
MVHACQVSSECSGCLRGGEEGMPWLLPPLCHHLPAHLGLKSVWTAESVSEKPVLGQELGNRAVKEVQSGEERRKLDLGTDRIPQACSTSQPLYAPTLGLWTGFMFCLISVPEAEMGMVERSSTQVAPGMGMSTPYSPCVSS

SEQ ID NO: 3386 - protein, 336 aa, Homo sapiens [sequence omitted]

SEQ ID NO: 3387 - protein, 1088 aa, Homo sapiens
MANGTADVRKLFIFTTTQNYFGLMSELWDQPLLCNCLEINNFLDDGNQMLLRVQRSDAGISFSNTIEFGDTKDKVLVFFKLRPEVITDENLHDNILVSSMLESPISSLYQAVRQVFAPMLLKDQEWSRNFDPKLQNLLSELEAGLGIVLRRSDTNLTKLKFKEDDTRGILTPSDEFQFWIEQAHRGNKQISKERANYFKELFETIAREFYNLDSLSLLEVVDLVETTQDVVDDVWRQTEHDHYPESRMLHLLDIIGGSFGRFVQKKLGTLNLWEDPYYLVKESLKAGISICEQWVIVCNHLTGQVWQRYVPHPWKNEKYFPETLDKLGKRLEEVLAIRTIHEKFLYFLPASEEKIICLTRVFEPFTGLNPVQYNPYTEPLWKAAVSQYEKIIAPAEQKIAGKLKNYISEIQDSPQQLLQAFLKYKELVKRPTISKELMLERETLLARLVDSIKDFRLDFENRCRGIPGDASGPLSGKNLSEVVNSIVWVRQLELKVDDTIKIAEALLSDLPGFRCFHQSAKDLLDQLKLYEQEQFDDWSRDIQSGLSDSRSGLCIEASSRIMELDSNDGLLKVHYSDRLVILLREVRQLSALGFVIPAKIQQVANIAQKFCKQAIILKQVAHFYNSIDQQMIQSQRPMMLQSALAFEQIIKNSKAGSGGKSQITWDNPKELEGYIQKLQNAAERLATENRKLRKWHTTFCEKVVVLMNIDLLRQQQRWKDGLQELRTGLATVEAQGFQASDMHAWKQHWNHQLYKALEHQYQMGLEALNENLPEINIDLTYKQGRLQFRPPFEEIRAKYYREMKRFIGIPNQFKGVGEAGDESIFSIMIDRNASGFLTIFSKAEDLFRRLSAVLHQHKEWIVIGQVDMEALVEKHLFTVHDWEKNFKALKIKGKEVERLPSAVKVDCLNINCNPVKTVIDDLIQKLFDLLVLSLKKSIQAHLHEIDTFVTEAMEVLTIMPQSVEEIGDANLQYSKLQERKPEILPLFQEAEDKNRLLRTVAGGGLETISNLKAKWDKFELMMESHQLMIKDQIEVMKGNVKSRLQIYYQELEKFKARWDQLKPGDDVIETGQHNTLDKSAKLIKEKKI

SEQ ID NO: 3388 - protein, 352 aa, Homo sapiens [sequence omitted]

SEQ ID NO: 3389 - protein, 152 aa, Homo sapiens
MQPRSRWQAQNSETKSHGAKVRHAFLAHLCVKKVTGMLTTQVLGVRPGQRRGPCCSRIDRQLASKLGAQRQRLPIHLSTLLSHLFPKDDPKALHSIFQRDMGVEGMEVLSHLLLLHLEAPRSTDTDHPLSVKNVLFQEAPQLRLKETAPPPG

SEQ ID NO: 3390 - protein, 129 aa, Homo sapiens [sequence omitted]

SEQ ID NO: 3391 - protein, 136 aa, Homo sapiens [sequence omitted]

SEQ ID NO: 3392 - protein, 235 aa, Homo sapiens
MRPLAGGLLKVVFVVFASLCAWYSGYLLAELIPDAPLSSAAYSIRSIGERPVLKAPVPKRQKCDHWTPCPSDTYAYRLLSGGGRSKYAKICFEDNLLMGEQLGNVARGINIAIVNYVTGNVTATRCFDMYEGDNSGPMTKFIQSAAPKSLLFMVTYDDGSTRLNNDAKNAIEALGSKEIRNMKFRSSWVFIAAKGLELPSEIQREKINHSDAKNNRYSGWPAEIQIEGCIPKERS

SEQ ID NO: 3393 - protein, 118 aa, Homo sapiens
MCAQNYVVLLDSTLPRSQYDYILPQVSFTAVGYHKHITLIFNPTRKLPEQDIAQGSYIALPLTLLVLLAGYNHDKLIPLLLQLTSRLQGVRALGQAASDNSGPEDAKRQAKKQKTRRT

SEQ ID NO: 3394 - protein, 548 aa, Homo sapiens
MHRLKCMVKAFFLTFCQVSSEDRSALWALVTFYGGDCQLTLNKKCTHLIVPEPKGEKYECALKRASIKIVTPDWVLDCVSEKTKKDEAFYHPRLIIYEEEEEEEEEEEEVENEEQDSQNEGSTDEKSSPASSQEGSPSGDQQFSPKSNTEKSKGELMFDDSSDSSPEKQERNLNWTPAEVPQLAAAKRRLPQGKEPGLINLCANVPPVPGNILPPEVRGNLMAAGQNLQSSERSEMIATWSPAVRTLRNITNNADIQQMNRPSNVAHILQTLSAPTKNLEQQVNHSQQGHTNANAVLFSQVKVTPETHMLQQQQQAQQQQQQHPVLHLQPQQIMQLQQQQQQQISQQPYPQQPPHPFSQQQQQQQQAHPHQFSQQQLQFPQQQLHPPQQLHRPQQQLQPFQQQHALQQQFHQLQQHQLQQQQLAQLQQQHSLLQQQQQQQIQQQQLQRMHQQQQQQQMQSQTAPHLSQTSQALQHQVPPQQPPQQQQQQQPPPSPQQHQLFGHDPAVEIPEEGFLLGCVFAIADYPEQMSDKQLLATWKRVRLCLEEG

SEQ ID NO: 3395 - protein, 133 aa, Homo sapiens
MGSLMAEMVVKPTMSLKYSVTCSKYSGSTGVPVFKASATDLGMAGSEVTWGPLYLAGLQLPSQPTPSHWHPRRQHLCKQPVCLLLFQLQLLRALPDQILQVTRVLLQHPKHRVNDVRLPALVDVLELAVEGSW

SEQ ID NO: 3396 - protein, 548 aa, Homo sapiens
MQPGLSPGSPGDPRPPTPETDYPESLTSYPEEDYSPVGSFGEPGPTSPLTTPPGWSCHVSQDKQMLYTNHFTQEQWVRLEDPHGKPYFYNPEDSSVRWELPQVPVPAPRSIHKSSQDGDTPAQASPPEEKVPAELDEVGSWEEVSPATAAVRTKTLDKAGVLHRTKTADKGKRLRKKHWSASWTVLEGGVLTFFKDSKTSAAGGLRQPSKFSTPEYTVELRGATLSWAPKDKSSRKNVLELRSRDGSEYLIQHDSEAIISTWHKAIAQGIQELSAELPPEESESSRVDFGSSERLGSWQEKEEDARPNAAAPALGPVGLESDLSKVRHKLRKFLQRRPTLQSLREKGYIKDQVFGCALAALCERERSRVPRFVQQCIRAVEARGLDIDGLYRISGNLATIQKLRYKVDHDERLDLDDGRWEDVHVITGALKLFFRELPEPLFPFSHFRQFIAAIKLQDQARRSRCVRDLVRSLPAPNHDTLRMLFQHLCRVIEHGEQNRMSVQSVAIVFGPTLLRPEVEETSMPMTMVFQNQVVELILQQCADIFPPH

SEQ ID NO: 3397 - protein, 118 aa, Homo sapiens
MMDASKELQVLHIDFLNQDNAVSHHTWEFQTSSPVFRRGQVFHLRLVLNQPLQSYHQLKLEFSTGPNPSIAKHTLVVLDPRTPSDHYNWQATLQNESGKEVSTHWAGGWAGWLLAECS

SEQ ID NO: 3398 - protein, 115 aa, Homo sapiens
MPGAEMWTEGDFSASLAGACSKLADALCACWARSPSSGEALGLEQLGLSWLLTPEPGSLLVLHYLATSAQGPDKRYCLRATEDTGAQSWTTGPGPGRTRRSRPSAALWGRSPWGC

SEQ ID NO: 3399 - protein, 102 aa, Homo sapiens [sequence omitted]

SEQ ID NO: 3400 - protein, 123 aa, Homo sapiens
MEVVVIHSSPMSRRRYSFLHLWECGSGWLPVDSPPRTGLGHRCCLAQGHVPSPRSSHTKWLSCVHQGSTTLGATTAPGLPVGWLGPLLCMHHSPTSLGPILKAVLHKAFTCNLRASESVPWGS

SEQ ID NO: 3401 - protein, 443 aa, Homo sapiens [sequence omitted]

SEQ ID NO: 3402 - protein, 555 aa, Homo sapiens [sequence omitted]

SEQ ID NO: 3403 - protein, 121 aa, Homo sapiens
MKSRLRRSQMEMRDLLGPGVKVTFVRTLWLETLCPCPRNLWNFELESEDLGYLAEEISKQQSVQDVAWLLLVVCAHICEQRHDKKLELIFKKEAECKSLENLQPGHVVEKKKNHFLERNSS

SEQ ID NO: 3404 - protein, 110 aa, Homo sapiens [sequence omitted]

SEQ ID NO: 3405 - protein, 120 aa, Homo sapiens
MTRGTQGLPMTMGPRGRHLAQGPVLETDDPRRRRQGRREAGRAGMVSQAEGRTRTRMELGNDPGVFGGCRWVRMAVQGGKGCVAGEQPGEAQTLLKRCLLCRPPHPLPAPSGAPAPPCSA

SEQ ID NO: 3406 - protein, 100 aa, Homo sapiens [sequence omitted]

SEQ ID NO: 3407 - protein, 258 aa, Homo sapiens
MASLLFLVVNLTCAMLVHGDVPENQLKWTVFVRALINDSLFILCAISLVCYICKITKMSSANVYLESKGMSLCQTVVVGSVVILLYSSRACYNLVVVTISQDTLESPFNYGWDNLSDKAHVEDISGEEYIVFGMVLFLWEHVPAWSVVLFFRAQRLNQNLAPAGMINSHSYSSRAYFFDNPRRYDSDDDLPRLGSSREGSLPNSQSLGWYGTMTGCGSSSYTVTPHLNGPMTDTAPLLFTCSNLDLNNHHSLYVTPQN

SEQ ID NO: 3408 - protein, 199 aa, Homo sapiens
MSATLRERLRKTRFSFNSSYNVVKRLKVESEENDQTFSEKPASSTEENCLEFQESFKHIDSEFEENTNLKNTLKNLNVCESQSLDSGSCSALQNEFVSEKLPKQRLNAEKAKLVKQVQEKEDLLRRLKLVKMYRSKNDLSQLQLLIKKWRSCSQLLLYELQSAVSEENKKLSLTQLIDHYGLDDRLLHYNRSEEEFIDV

SEQ ID NO: 3409 - protein, 124 aa, Homo sapiens
MPKGGCPKAPQQEELPLSSDMVEKQTGKKDKDKVSLTKTPKLERGDGGKEVRERASKRKLPFTAGANGEQKDSDTGPPGSCLSWGSHEGALVRSAMGRSCLPSARGCFFGTRGKIMIFLFCFDL

SEQ ID NO: 3410 - protein, 148 aa, Homo sapiens
MPFAEDKTYKYICRNFSNFCNVDVVEILPYLPCLTARDQDRLRATCTLSGNRDTLWHLFNTLQLPTWAGEETPGGQSSGRGLDFSSLTSGAVWLWQMSDFWSCFSTWTVSIWLILHWVLLRLNLQVFAKCLAQSKWPLLLPSLSCPTW

SEQ ID NO: 3411 - protein, 527 aa, Homo sapiens
MLAKPHQRLTKYPLLLKSVLRKTEEPRAKEAVVAMIGSVERFIHHVNACMRQRQERQRLAAVVSRIDAYEVVESSSDEVDKLLKEFLHLDLTAPIPGASPEETRQLLLEGSLRMKEGKDSKMDVYCFLFTDLLLVTKAVKKAERTRVIRPPLLVDKIVCRELRDPGSFLLIYLNEFHSAVGAYTFQASGQALCRGWVDTIYNAQNQLQQLRAQEPPGSQQPLQSLEEEEDEQEEEEEEEEEEEEGEDSGTSAASSPTIMRKSSGSPDSQHCASDGSTETLAMVVVEPGDTLSSPEFDSGPFSSQSDETSLSTTASSATPTSELLPLGPVDGRSCSMDSAYGTLSPTSLQDFVAPGPMAELVPRAPESPRVPSPPPSPRLRRRTPVQLLSCPPHLLKSKSEASLLQLLAGAGTHGTPSAPSRSLSELCLAVPAPGIRTQGSPQEAGPSWDCRGAPSPGSGPGLVGCLAGEPAGSHRKRCGDLPSGASPRVQPEPPPGVSAQHRKLTLAQLYRIRTTLLLNSTLTASEV

SEQ ID NO: 3412 - protein, 632 aa, Homo sapiens [sequence omitted]

SEQ ID NO: 3413 - protein, 186 aa, Homo sapiens
MGLMMVGVLIGTFIAHVVCKRLLTAWVAARIQSSEKLSAVIRVVEGGSGLKVVALARLTPIPFGLQNAVFSITDLSLPNYLMASSVGLLPTQLLNSYLGTTLRTMEDVIAEQSVSGYFVFCLQIIISIGLMFYVVHRAQVELNAAIVACEMELKSSLVKGNQPNTSGSSFYNKRTLTFSGGGINVV

SEQ ID NO: 3414 - protein, 156 aa, Homo sapiens
MQVPPLYSALKKDGQRLSTLMKRGEVVEAKPARPVTVYSISLQKFQPPFFTLDVECGGGFYIRSLVSDIGKELSSCANVLELTRTKQGPFTLEEHALPEDKWTIDDIAQSLEHCSSLFPAELALKKSKPESNEQVLSCEYITLNEPKREDDVIKTC

SEQ ID NO: 3415 - protein, 373 aa, Homo sapiens [sequence omitted]

SEQ ID NO: 3416 - protein, 847 aa, Homo sapiens [sequence omitted]

SEQ ID NO: 3417 - protein, 653 aa, Homo sapiens
MVELVNIEPVCVRGGLYEVDVTQGECYPVYWNQADKIPVMRGQWFIDGTWQPLEEEESNLIEQEHLNCFRGQQMQENFDIEVSKSIDGKDAVHSFKLSRNHVDWHSVDEVYLYSDATTSKIARTVTQKLGFSKASSSGTRLHRGYVEEATLEDKPSQTTHIVFVVHGIGQKMDQGRIIKNTAMMREAARKIEERHFSNHATHVEFLPVEWRSKLTLDGDTVDSITPDKVRGLRDMLNSSAMDIMYYTSPLYRDELVKGLQQELNRLYSLFCSRNPDFEEKGGKVSIVSHSLGCVITYDIMTGWNPVRLYEQLLQKEEELPDERWMSYEERHLLDELYITKRRLKEIEERLHGLKASSMTQTPALKFKVENFFCMGSPLAVFLALRGIRPGNTGSQDHILPREICNRLLNIFHPTDPVAYRLEPLILKHYSNISPVQIHWYNTSNPLPYEHMKPSFLNPAKEPTSVSENEGISTIPSPVTSPVLSRRHYGESITNIGKASILGAASIGKGLGGMLFSRFGRSSTTQSSETSKDSMEDEKKPVASPSATTVGTQTLPHSSSGFLDSAYFRLQESFFNLPQLLFPENVMQNKDNALVELDHRIDFELREGLVESRYWSAVTSHTAYWSSLDVALFLLTFMYKHEHDDDAKPNLDPI

SEQ ID NO: 3418 - protein, 531 aa, Homo sapiens [sequence omitted]

SEQ ID NO: 3419 - protein, 112 aa, Homo sapiens [sequence omitted]

SEQ ID NO: 3420 - protein, 167 aa, Homo sapiens
MLTVALLALLCASASGNAIQARSSSYSGEYGSGGGKRFSHSGNQLDGPITALRVRVNTYYIVGLQVRYGKVWSDYVGGRNGDLEEIFLHPGESVIQVSGKYKWYLKKLVFVTDKGRYLSFGKDSGTSFNAVPLHPNTVLRFISGRSGSLIDAIGLHWDVYPTSCSRC

SEQ ID NO: 3421 - protein, 323 aa, Homo sapiens
MIGCLHARVSGPLWDAGLCPASSRSAHTCLSLSVSDAPVSPATAPHCLLLSTAPAPPCPCHGVLNSHPFSPPFPQRPDQELTGSWGHGPRSTLVRAKAMAPPPPPLAASTPLLHGEFGSYPARGPRFALTLTSQALHIQRLRPKPEARPRGGLVPLAEVSGCCTLRSRSPSDSAAYFCIYTYPRGRRGARRRATRTFRADGAATYEENRAEAQRWATALTCLLRGLPLPGDGGEVLGSCSILEPPWCLCRISSIGSCVFIFLCVWVMYLSGSVRSDTQGWATEGTKRQEDRMWWLMSVILAIWEAEAGGSPEIRSSRPAWLTW

SEQ ID NO: 3422 - protein, 105 aa, Homo sapiens
MSVVPEKSGCLCLASLHTWALTSRLLGSSSSVSRAAVLLLLVFPHFPPGKERLPNAGMEYKQNVMGSAVTPPPEAEAVLLEDRRRHHRVFPLPLPLLRNVSIPIG

SEQ ID NO: 3423 - protein, 133 aa, Homo sapiens
MVKGGSSIISPDTNLLNIKGSHSKSKNSHFFFSNTVKITAFSKKNENIFNCDLIDSVDQIKNMPCLDLREFGKDVKPWHVETTEAARNNENTGFDALSHECTAKPLFPRVEVQSEQLTVEEHIKRNRCYSDTE

SEQ ID NO: 3424 - protein, 139 aa, Homo sapiens [sequence omitted]

SEQ ID NO: 3425 - protein, 452 aa, Homo sapiens [sequence omitted]

SEQ ID NO: 3426 - protein, 398 aa, Homo sapiens [sequence omitted]

SEQ ID NO: 3427 - protein, 119 aa, Homo sapiens
MPAPMVVSGKAHSSSVTFPFSIHLRLHALQLLGLCSCHIEEGGWARHGIILRSLLHQLLGTMEYPRVVTADGATWGRAQVGQATAGVMACEPQATSGTFPTASMQGCRAMVPFSTALEL

SEQ ID NO: 3428 - protein, 148 aa, Homo sapiens [sequence omitted]

SEQ ID NO: 3429 - protein, 223 aa, Homo sapiens
MRPLGKGLLPAEELIRSNLGVGRSLRDCLSQSGKLAEELGSKRLKPAKFGTEGKERVEQRTERQRTGSSKEPRMQIICRRRWREPPPRLLWGCLMPRAQPLLHVTAYENTGHWERLASVVSSKTQQPTVISHSSISITFSHYPPATLDSFLVLEPIKLFPVSSLRSPLCLNCGSCRESIRISGELIGNAHSPAPPRTPELETLGWDKQAVLSGAQVILVCAEV

SEQ ID NO: 3430 - protein, 132 aa, Homo sapiens
MVTLMGVWLGPWGRGMAAPPTEGAAVTPASSPGPQASLAWRSSGSRPCCPLTASLTSPWRNQPLHTAPSGGGCCVTGPACSIAWAGRSPPSRWIFQRGLTATSTLPGSCWKGRSSASWPHTGAVCCPAPAPC

SEQ ID NO: 3431 - protein, 153 aa, Homo sapiens [sequence omitted]

SEQ ID NO: 3432 - protein, 387 aa, Homo sapiens
MSSPPALRDSPVCPRYSPTTPTFQLESLAGTQELPTNSAVALSYSPVSLMSSPPAPWDSPVCPSSSPTTPRFQRESASHTPESPTDSQTSRRSSLVSLRSLPSAHRDSCVSFSYSRNFSRFQLDSVPGTHDTPPNSRISLTYSPVSLMFSPPALRDSSVSLSYSPAISTSHLGSASHTQESPTNSRTLLQPSPISFTSSPPAFRDSPVSPSFSPAFPRFLPQSAPGTQGYPGHSQASRDYFPMTCIYRGMAPILPSVTSNPSPLTLRHSQGLTATPRYCPSARSPGPSTSQHDAATWPCLHISGEGPTPSRRRAPPAFRPHTQACPSTCYCHPLASRRGPCNGRYHRPVYPHPTAVQRDPPAGPRGCHSPCWHDAPACRRPCGPRYR

SEQ ID NO: 3433 - protein, 100 aa, Homo sapiens [sequence omitted]

SEQ ID NO: 3434 - protein, 102 aa, Homo sapiens
MQALSKLGSLSQLDWGPRPGSGAAGAWAWGLAVAHGLSSGLGWRRCSLAACAVLELTWGKAGLAGLGRARLWPRPLGRLRREQRLSPGALRCICARSVARCL

SEQ ID NO: 3435 - protein, 125 aa, Homo sapiens
MSSQCLETRTVIYRSIFLVFLKVSFHNTRSSLPLVSWRVHPTDESSFPVGLSHLGNSLRSTYQPRKKLPGYLLPTCPGLINTKGGKLKGAANWSTWKGGSTLDWCLSFSSFFLKKIYFLNNNKCT

SEQ ID NO: 3436 - protein, 101 aa, Homo sapiens
MDGQTERAANQQASSSQASHLWPCIFLSVGQRYKEIRQKYRRWSFALSPRLEGNDTTIAHWSLELLGSHDPPTSASQVAGTTATHHCGGLTGGVRTEVNSL

SEQ ID NO: 3437 - protein, 101 aa, Homo sapiens
MTPPPKTHTHTVVSYHSRWAMCKDSRDQECRWPQQGWLSFPCSFTSGTSAGKGLSSWNHAPVIGAAITWQLGLSAGMHTGALLCGVASSACLDFFYGGPEI

SEQ ID NO: 3438 - protein, 253 aa, Homo sapiens
MLILGSMFSLVEPVLTIAAALSVQSPFTRSAQSSPECAAARRPLESDQGDPFTLFNVFNAWVQVKSERSRNSRKWCRRRGIEEHRLYEMANLRRQFKELLEDHGLLAGAQAAQVGDSYSRLQQRRERRALHQLRRQHEEGAGRRRKVLRLQEEQDGGSSDEDRAGPAPPGASDGVDIQDVKFKLRHDLAQLQAAASSAQDLSREQLALLKLVLGRGLYPQLAVPDAFNSSRKDSDQVGPVLPHPMFCPPTHEP

SEQ ID NO: 3439 - protein, 180 aa, Homo sapiens
MAQPPVTLLCICSEVLVRAADSIWKWTLSGPGPGSVWPSTGEAGLRRGLRAEAPLQQLQEGPAPGEECLGRAWGLRVRRRGPLPPLPWGSERPPCCLEGAWQLEWEQRPQGGRAGGRGPAACPVPRKVTACFESAAKKSVGQFRQLSPELPRETHPACPALPTGSRRTEGTQLGARRPGL

SEQ ID NO: 3440 - protein, 126 aa, Homo sapiens
MPSFTHSPPEHSVSPMVRARLLRMAFKASVPSPRPAILQRVRSASPGPLPVLLCEAPCPHLFTCQPLHFLRVLTLVSWLPFYFKEPPVYLPPSVSLILLALSFFCIIYYLITYKKMYTLMCTVSNC

SEQ ID NO: 3441 - protein, 121 aa, Homo sapiens [sequence omitted]

SEQ ID NO: 3442 - protein, 322 aa, Homo sapiens [sequence omitted]

SEQ ID NO: 3443 - protein, 267 aa, Homo sapiens
MKAEATVIPSRCARGLPSWQVLSPVQPWQTSAPQNTTQPKLLAPHQHDKSQKKSSLLKELGAFHITIALLHLVFGGYLASIVKNLHLVVLKSWYPFWGAASFLISGILAITMKTFSKTYLKMLCLMTNLISLFCVLSGLFVISKDLFLESPFESPIWRMYPNSTVHIQRLELALLCFTVLELFLPVPTAVTAWRGDCPSAKNDDACLVPNTPLHLKGLPVEPPPSYQSVIQGDAQHKQHQRLREVKQVAPDTWIVTDGAAIWAQTAN

SEQ ID NO: 3444 - protein, 497 aa, Homo sapiens [sequence omitted]

SEQ ID NO: 3445 - protein, 101 aa, Homo sapiens
MAGLARRVVGAFLLFHFKQKSGAETGEAALHLGRSPVLPARAGILRTCLSLRAVTSPQDFGSAQRTRSAPLGPINQASRRVQPGKANPERRANDSDSQGKA

SEQ ID NO: 3446 - protein, 175 aa, Homo sapiens
MHGEKSHGRGQAGRQVPLKQQSVSGESQQGARQGAGQSTCYLSSAFLCNGSFPAGSMSLWDPQPKQAFPSVLWCSWAGVPGRRTGQRDPRVQERRGDFVSKLGAAVGGEPLALFGPHSWPGMGHRVPGLGAGFLLFAGFALEPWDSYHVVFEGWTIDMRRNEPERTRSLSAPGPL

SEQ ID NO: 3447 - protein, 487 aa, Homo sapiens [sequence omitted]

SEQ ID NO: 3448 - protein, 167 aa, Homo sapiens [sequence omitted]

SEQ ID NO: 3449 - protein, 425 aa, Homo sapiens [sequence omitted]

SEQ ID NO: 3450 - protein, 153 aa, Homo sapiens
MVTLRSKLGPLEIQQFAMLLREYRLGLPIQDYCTGLLKLYGDRRKFLLLGMRPFIPDQDIGYFEGFLEGVGIREGGILTDSFGRIKRSMSSTSASAVRSYDGAAQRPEAQAFHRLLADITHDIEALAPDDDDDDEDEPRGSRGGSDAAEDNYL

SEQ ID NO: 3451 - protein, 436 aa, Homo sapiens
MRRDVNGVTKSRFEMFSNSDEAVINKKLPKELLLRIFSFLDVVTLCRCAQVSRAWNVLALDGSNWQRIDLFDFQRDIEGRVVENISKRCGGFLRKLSLRGCLGVGDNALRTFAQNCRNIEVLNLNGCTKTTDATCTSLSKFCSKLRHLDLASCTSITNMSLKALSEGCPLLEQLNISWCDQVTKDGIQALVRGCGGLKALFLKGCTQLEDEALKYIGAHCPELVTLNLQTCLQITDEGLITICRGCHKLQSLCASGCSNITDAILNALGQNCPRLRILEVARCSQLTDVGFTTLARNCHELERMDLEECVQITDSTLIQLSIHCPRLQVLSLSHCELITDDGIRHLGNGACAHDQLEVIELDNCPLITDASLEHLKSCHSLERIELYDCQQITRAGIKRLRTHLPNIKVYAYFSPVTPPPSVGGSRQRFCRCCIIL

SEQ ID NO: 3452 - protein, 103 aa, Homo sapiens
MGATEAAGGAAVSRARNQTWTALGPGCRDQVTRSPEGCWPRSQNPGAARTIGSSLYGTGDRHPALVPCAVADGETEASSLPGITVILEQRGPERACSWPKVTQ

SEQ ID NO: 3453 - protein, 319 aa, Homo sapiens [sequence omitted]

SEQ ID NO: 3454 - protein, 124 aa, Homo sapiens
MGKRDPRAQLFLPSAGLLQTSRLHCRLRHFLAEPPSFLLSFQLLLLHCPFLSPLSCTSASILASSSLKTQPDTISIITLFISQWRRWGSRQERQSVNMLPLKFCTALSLLGLWAKIKCKSLYYS

SEQ ID NO: 3455 - protein, 375 aa, Homo sapiens
MEDSEALGFEHMGLDPRLLQAVTDLGWSRPTLIQEKAIPLALEGKDLLARARTGSGKTAAYAIPMLQLLLHRKATGPVVEQAVRGLVLVPTKELARQAQSMIQQLATYCARDVRVANVSAAEDSVSQRAVLMEKPDVVVGTPSRILSHLQQDSLKLRDSLELLVVDEADLLFSFGFEEELKSLLCHLPRIYQAFLMSATFNEDVQALKELILHNPVTLKLQESQLPGPDQLQQFQVVCETEEDKFLLLYALLKLSLIRGKSLLFVNTLERSYRLRLFLEQFSIPTCVLNGELPLRSRCHIISQFNQGFYDCVIATDAEVLGAPVKGKRRGRGPKGDKASDPEAGVARGIDFHHVSAVLNFDLPPTPEAYIHRAGR

SEQ ID NO: 3456 - protein, 309 aa, Homo sapiens
MLPEDSGGSPDAAASDKHIQWLLGADGEVWVWIMGEGPGDKPYEEISEELIAERARLQAQREAEELWRQKEAEITKKFRDALANEKARILAEKWKVEMEDRKAAKVLEERIHEEFKRKEEEERKRGEEQIRLQEEQRAKELYWTLKQAQLHCQASEKEEREWEEQLRRSKAADEERSRRAQRARDEYRHHSLRAIQKGTVAGLSSMFRELGQSHEQEARLYHHLPDPGLPQPLALPVSRTWERPLRPVSRDVIVRWFKEEQLPRRAGFERNTKFIAPWFHGGNYHCFRRRVTSGTLRTEGQPTRLPSVV

SEQ ID NO: 3457 - protein, 235 aa, Homo sapiens [sequence omitted]

SEQ ID NO: 3458 - protein, 123 aa, Homo sapiens [sequence omitted]

SEQ ID NO: 3459 - protein, 128 aa, Homo sapiens
MKVKQALMVTLTQQDRYPYQKGISGHRDRRARVETPEDEDGIYQAGEWPQEKRALPTPRPRTSSLQSRVKRNFHHLSCPVCGTLPRQPEQTVQAPKTLSACVILARTTLPEATAMSKLIVRFLPATWF

SEQ ID NO: 3460 - protein, 126 aa, Homo sapiens
MLRLRKQGHVRRRGKSIGENKDTGGDATWRSPESRETNEPRTQMAKKKNERICKRQHSNMPNKSRVLVFKHLYLPRVTRQLISFHICSRFVFRNKTHVLKSCLYVAPVLLPPPPVLKSISALLIYG

SEQ ID NO: 3461 - protein, 521 aa, Homo sapiens
MEFGLSWIFLVVTLKGVHCEVQLVESGGGLVKPGGSLRLSCVASGFTFSNTWMTWVRQAPGKGLEWVGRISTDSEGATVDYAAPVKGRFTISRDDSKKTLYLQMNSLQVEDTAVYYCSTGPSRVPGTQRYFDFWGRGTRVTVSSASTKGPSVFPLAPCSRSTSGGTAALGCLVKDYFPEPVTVSWNSGALTSGVHTFPAVLQSSGLYSLSSVVTVPSSSLGTQTYTCNVNHKPSNTKVDKRVELKTPLGDTTHTCPRCPEPKSCDTPPPCPRCPEPKSCDTPPPCPRCPEPKSCDTPPPCPRCPAPELLGGPSVFLFPPKPKDTLMISRTPEVTCVVVDVSHEDPEVQFKWYVDGVEVHNAKTKPREEQFNSTFRVVSVLTVLHQDWLNGKEYKCKVSNKALPAPIEKTISKTKGQPREPQVYTLPPSREEMTKNQVSLTCLVKGFYPSDIAVEWESSGQPENNYNTTPPMLDSDGSFFLYSKLTVDKSRWQQGNIFSCSVMHEALHNRFTQKSLSLSPGK

SEQ ID NO: 3462 - protein, 551 aa, Homo sapiens
MISPDPRPSPGLARWAESYEAKCERRQEIRESRRCRPNVTTCRQVGKTLRIQQREQLQRARLQQFFRRRNLELEEKGKAQHPQAREQGPSRRPGQVTVLKEPLSCARRISSPREQVTGTSSEVFPAQHPPPSGICRDLSDHLSSQAGGLPPQDTPIKKPPKHHRGTQTKAEGPTIKNDASQQTNYGVAVLDKEIIQLSDYLKEALQRELVLKQKMVILQDLLSTLIQASDSSWKGQLNEDKLKGKLRSLENQLYTCTQKYSPWGMKKVLLEMEDQKNSYEQKAKESLQKVLEEKMNAEQQLQSTQRSLALAEQKCEEWRSQYEALKEDWRTLGTQHRELESQLHVLQSKLQGADSRDLQMNQALRFLENEHQELQAKIECLQGDRDLCSLDTQDLQDQLKRSEAEKLTLVTRVQQLQGLLQNQSLQLQEQEKLLTKKDQALPVWSPKSFPNEVEPEGTGKEKDWDLRDQLQKKTLQLQAKEKECRELHSELGNLSDEYLSCLRKLQHCREELNQSQQLPPRRQCGRWLPVLMVVIAAALAVFLANKDNLMI

SEQ ID NO: 3463 - protein, 1047 aa, Homo sapiens; identical to SEQ ID NO: 2917

SEQ ID NO: 3464 - protein, 358 aa, Homo sapiens [sequence omitted]

SEQ ID NO: 3465 - protein, 336 aa, Homo sapiens
MSRSVLEALTSSTAMQCVPSDGCAMLLRVRASITLHERLRGLEACAMSLDTQETQCQSVWVARASHRQQRGRQLQVHFGCFAVSVAQHLYVTLRTIPHFCGVQLDQRHLVEAGKLSYWVDRRRKAILVQVPRASGSPDYYLRLCLKRFTCEDAGAPVRVTANSVPQAVFLPYSQELPCLCLEGWSATPDAVRIQICPFENDTEALEVLWDTVYYHPESQTLSWEPACPVSGHVSLCWRPGPGAGCRKLQQSSQLVHRRVQYPLVDTQPQLCLKFSTSWGSWVRCPFEQRRFPTPPTSRCTCVTGGSHSSLPANAHSRPARSLQPQVTWQPPLLLPS

SEQ ID NO: 3466 - protein, 295 aa, Homo sapiens
MAVMAPRTLVLLLSGALALTQTWAGSHSMRYFYTSVSRPGRGEPRFIAVGYVDDTQFVRFDSDAASQRMEPRAPWIEQEGPEYWDRNTRNVKAHSQTDRRYLENGKETLQRTDAPKTHMTHHAVSDHEATLRCWALSFYPAEITLTWQRDGEDQTQDTELVETRPAGDGTFQKWASVVVPSGQEQRYTCHVQHEGLPKPLTLRWEPSSQPTIPIVGIIAGLVLFGAVIAGAVVAAVMWRRKSSGGEGMKGGSEISCLTEGSKTQVEVCPASLLGSTIHNYEPTQPGPCVPALTLL

SEQ ID NO: 3467 - protein, 368 aa, Homo sapiens
MEGLVFLNALATRLLFLLHSLVGVWRVTEVKKEPRYWLLALLNLLLFLETALTLKFKRGRGYKWFSPAIFLYLISIVPSLWLLELHHETQYCSIQAEGTSQNTSRKEDFNQTLTSNEQTSRADDLIETAKVFVNNLSTVCEKVWTLGLHQTFLLMLIIGRWLLPIGGGITRDQLSQLLLMFVGTAADILEFTSETLEEQNVRNSPALVYAILVIWTWSMLQFPLDLAVQNVVCPVSVTERGFPSLFFCQYSADLWNIGISVFIQDGPFLVVRLILMTYFKVINQMLVFFAAKNFLVVVLQLYRLVVLALAVRASLRSQSEGLKGEHGCRAQTSESGPSQRDWQNESKEGLAIPLRGSPVTSDDSHHTP

SEQ ID NO: 3468 - protein, 200 aa, Homo sapiens
MGVPNFLSFFSFLFFFFKSLRQGLAQLPRLECSGTISAHCSLNLLGSSDPPTLASSISGTAGTHHHAQLIFFFFFLRQGLTLSPTLECSGTISAHCNLCLLGSSDSPASASQVAGNTGVHHHTRLIFVFLLETRFCHVGQTGLKLLISGDQPTLASQSAGITGMSCRAQPCFPYHLSRAPCVRGLGPLSHHKLQRGSAAT

SEQ ID NO: 3469 - protein, 128 aa, Homo sapiens [sequence omitted]

SEQ ID NO: 3470 - protein, 136 aa, Homo sapiens
MVELTVAARQAYKTMLENVQQELVGEPRPQAPPSLPMGVVAATLEVVGTRAMGVAGIMTVDLEGMDMDMDVPETIMAETRVVMTATQEEITETIMTTEMRHAHNIDTQGIISDPGSSFQMAVFIKVFGAALKHLIL

SEQ ID NO: 3471 - protein, 168 aa, Homo sapiens [sequence omitted]

SEQ ID NO: 3472 - protein, 189 aa, Homo sapiens [sequence omitted]

SEQ ID NO: 3473 - protein, 200 aa, Homo sapiens
MPRGLADKQGPEECDAVALLSLINSCDHFVVDRKKVTEVIKCRNEIMHSSEMKVSSTWLRDFQMKIQNFLNEFKNIPEIVAVYSRIEQLLTSDWAVHIPEEDQRDGCECEMGTYLSESQVNEIEMQLLKEKLQEIYLQAEEQEVLPEELSNRLEVVKEFLRNNEDLRNGLTEDMQKLDSLCLHQKLDSQEPGRQTPDRKA

SEQ ID NO: 3474 - protein, 120 aa, Homo sapiens
MDGRAAGGRGGGFLRREVGSLQPPSHCPHPTVWLLPGLSFPICETGEMGSLSGPRSILMGVRAWQGLCRLGSELGRPGCVATGVSAPTSPFETCPAFLFAAATAVRFATRSCGCPPRQGD

SEQ ID NO: 3475 - protein, 155 aa, Homo sapiens [sequence omitted]

SEQ ID NO: 3476 - protein, 113 aa, Homo sapiens
MISVHCNLRLPGSSDSPALASQIAGITGMHHHARQIFIFLIETGFHHVDQAGLKLLASSYLPALASQSFGITGVSHRAWPPLNTLKMSQCILVSIFYIGKFVVNLILIPVHLV

SEQ ID NO: 3477 - protein, 124 aa, Homo sapiens [sequence omitted]

SEQ ID NO: 3478 - protein, 104 aa, Homo sapiens
MWWPLAGMTDSEVITHSHCNCHSVASFSQGQGPGERTGWQPAAQLEMRSLSFSSYLMEASQMQDGSSRPSITSSQCPKARREAVVFKSRKTFLNLARIASQTLS

SEQ ID NO: 3479 - protein, 145 aa, Homo sapiens
MEAQSCEQETTARRNGGARSLKGNAAGGVVKDNICFGATSGAVTKKPSTLRKKEKFGYRETPCSKCCDSKTAGFAPLAKEPTETPGAATAKPALEGLGWRKPRTETRKLCTARLAVDTNRKVSRLLSGRKRGSKPATQWREPRSH

SEQ ID NO: 3480 - protein, 240 aa, Homo sapiens
MGLHLWAAGPGTHPAGISDLLAEVSAEVDGPVPGYLSSPQSITDTCLYIFTSGTTGLPKAARISHLKILQCQGFYQLCGVHQEDVIYLALPLYHMSGSLLGIVGCMGIGATVVLKSKFSAGQFWEDCQQHRVTVFQYIGELCRYLVNQPPSKAERGHKVRLAVGSGLRPDTWERFVRRFGPLQVLETYGLTEGNVATINYTGQRGAVGRASWLYKESQFGTPRGTVWPHLQVSQGCWWPR

SEQ ID NO: 3481 - protein, 164 aa, Homo sapiens [sequence omitted]

SEQ ID NO: 3482 - protein, 127 aa, Homo sapiens
MPVCPCLHLFFSFFFFCFLRWSFALSPRLECSGAILARCSLHLPGSSDSPASASRVAGITGMCYHTWLILVFLIETGFHHVGQAGLELLTSSDLPALASQSVGITGLSHPARPNASILFLDAFHSKW

SEQ ID NO: 3483 - protein, 165 aa, Homo sapiens; identical to SEQ ID NO: 2548

SEQ ID NO: 3484 - protein, 405 aa, Homo sapiens [sequence omitted]

SEQ ID NO: 3485 - protein, 126 aa, Homo sapiens [sequence omitted]

SEQ ID NO: 3486 - protein, 329 aa, Homo sapiens
MLFPALFPMLFPALFSVLFPALFPMLFPELFPVLFPMLFPALLPALFHMLFPALFPMLFPALFSAPFPMRSLHCSPRCSPCCSPRCSPCCSLHCSPCCSLQCSLHCSPHCSLHCSPCCFLHYSPCCSLHFSLCRSPCIPCTVPCTVPHAVPCNAPCTVPRTAPCTIPHAVPCTFLCAVPHAFPALFPALFPMLFPALFPMLFPAPFPMLFPAGFPALFPMLFPAPFPMLFPAGFPALFPMLFPAHFMPQTFPFSHQHTGSSFKSFCSVSNHSSAGTGWGQDGVRPCRPWPSRSVPLRRLPQRHGRLLKATERSTCWTPTTRATPSCGCP

SEQ ID NO: 3487 - protein, 163 aa, Homo sapiens
MIEILNKSKNCEGFSERRTGRGIWTWVCMHRPGCSRVADQQHLEDFTECFCHLHPSWPRPALFPLLLQLIFPDLVEGLVLVNIDPNGKGWIDWAATKLSGLTSTLPDTVLSHLFSQEELVNNTELVQSYRQQIGNVVNQANLQLFWNMYNSHFPGALWAQLVL

SEQ ID NO: 3488 - protein, 109 aa, Homo sapiens
MNGRLSKEDVYAASKHEKSSSSLFIREMQIKTAMRYHLMPVRMVVIKKSGNNRCWRGCGEIGTLLHCWWEGKLVQPLWKTVWQFTKDLVLEIPFDPAIPLLGIYPKDYK

SEQ ID NO: 3489 - protein, 111 aa, Homo sapiens
MEKNISLYEYTTFCLSIYPLIGCFYFFLAIMNNIAVNICVQGFSGHKFLFFLGIYLGVELLGHIVILFNFLKNFPTVLHGGCAIVYSYQQCMKLQISPHPENPFIIFCFSF

SEQ ID NO: 3490 - protein, 199 aa, Homo sapiens
MVSRPPRTPLSPSSWTPAMGLRASRNCSRTENAVCGCSPGHFCIVQDGDHCAACRAYATSSPGQRVQKGGTESQDTLCQNCPPGTFSPNGTLEECQHQTKCSWLVTKAGAGTSSSHWVWWFLSGSLVIVIVCSTVGLIICVKRRKPRGDVVKVIVSVQRKRQEAEGEATVIEALQAPPDVTTVAVEETIPSFTGRSPNH

SEQ ID NO: 3491 - protein, 120 aa, Homo sapiens
MRKEKQSKSLLYLLKISSLFSSTLFHQHLPAQNFHNDPILKPNSVSRLLTSTIARTHENLLIQAHAMAQAHAEQAPLTPLLLPSASTALLNRHVNTGPFMHRSKGSLRPKALCTTLCDSL

SEQ ID NO: 3492 - protein, 107 aa, Homo sapiens [sequence omitted]

SEQ ID NO: 3493 - protein, 117 aa, Homo sapiens [sequence omitted]

SEQ ID NO: 3494 - protein, 111 aa, Homo sapiens [sequence omitted]

SEQ ID NO: 3495 - protein, 168 aa, Homo sapiens
MRLPARLPSTSTSGSTSHCRTGFWTLGVPLPCWYSLSSGFHSTSPVLGTTSTWPTTSSRPFSCSRYCPRAPTLSCHPHSLHTWQEGDAKPCVLTQARSCLLLGGEGCDRAACPGPGARGRRSCRWPGGMENMPQERAFDLSLSLACQWGKQRGVQVEGPKDKAVLGKP

SEQ ID NO: 3496 - protein, 144 aa, Homo sapiens [sequence omitted]

SEQ ID NO: 3497 - protein, 329 aa, Homo sapiens [sequence omitted]

SEQ ID NO: 3498 - protein, 179 aa, Homo sapiens [sequence omitted]

SEQ ID NO: 3499 - protein, 303 aa, Homo sapiens
MTRARIGCFGPGGRARGTESAPEPSKRVPPGRSWQTQEVRQTRGANGLGPRAGSAGAKAPGPAQGAAQHGLGGSAGLRVRVSPLAMGSAALEILGLVLCLVGWGGLILACGLPMWQVTAFLDHNIVTAQTTWKGLWMSCVVQSTGHMQCKVYDSVLALSTEVQAARALTVSAVLLAFVALFVTLAGAQCTTCVAPGPAKARVALTGGVLYLFCGLLALVPLCWFANIVVREFYDPSVPVSQKYELGAALYIGWAATALLMVGGCLLCCGAWVCTGRPDLSFPVKYSAPRRPTATGDYDKKNYV

SEQ ID NO: 3500 - protein, 116 aa, Homo sapiens
MRNLQSSIQNWRRHTQTTLQGRLAAEAGPMKKMMKKTMRMYHVYYWPQTTSPLPRVAHRKQPAPFFFLFSPTTHHPSLQTLPPTRLGCRVCEAAQKVCKSPLCLICVFPRKRAGSL

SEQ ID NO: 3501 - protein, 114 aa, Homo sapiens
MFHHQQAYCLAPFDLIKVRLQNQTEPRAQPGSPPPRYQGPVHCAASIFREEGPRGLFRGAWALTLRDTPTVGIYFITYEGLCRQYTPEGQNPSSATVLWQGALQALLPGWQPRP

SEQ ID NO: 3502 - protein, 148 aa, Homo sapiens
MAGTLDLDKGCTVEELLRGCIEAFDDSGKVRDPQLVRMFLMMHPWYIPSSQLAAKLLHIYQQSRKDNSNSLQVKTCHLVRYWISAFPAEFDLNPELAEQIKELKALLDQEGNRRHSSLIDIDSVCVGGAQRAGGALSILYHLCLINVC

SEQ ID NO: 3503 - protein, 599 aa, Homo sapiens
MEHFLLEVAAAPLRLIAAKNEKSRSELGRFLAKQVWTPQDRQCVLSTLAQLLLDKDCTVLVGRQLRPLLLDLLERNAEAIKAGGQINHDLHERLCVSMSKLIGNHPDVLPFALRYFKDTSPVFQRLFLESSDANPVRYGRRRMKLRDLMEAAFKFLQQEQSVFRELWDWSVCVPLLRSHDTLVRWYTANCLALVTCMNEEHKLSFLKKIFNSDELIHFRLRLLEEAQLQDLEKALVLANPEVSLWRKQKELQYLQGHLVSSDLSPRVTAVCGVVLPGQLPAPGELGGNRSSSREQELALRSYVLVESVCKSLQTLAMAVASQNAVLLEGPIGCGKTSLVEYLAAVTGRTKPPQLLKVQLGDQTDSKMLLGMYRCTDVPGEFVWQPGTLTQAATMGHWILLEDIDYAPLDVVSVLIPLLENGELLIPGRGDCLKVAPGFQFFATRRLLSCGGNWYRPLNSHATLLDKYWTKIHLDNLDKRELNEVLQSRYPSLLAVVDHLLDIYIQLTGEKHHSWSDSSVGCEQAPEEVSEARRENKRPTLEGRELSLRYWTKQFFLFFLSFFFVRQIPALLPRLECSGAVLAHSNLRLLGSKFLPARSK

SEQ ID NO: 3504 - protein, 149 aa, Homo sapiens
MSSEESGTSISLLPALSLAAPDPGQRSSSQPSPAICSAPATLTPRSPHASRTPSSPLQSCTPSLSPRSHVPSPHQALVTRPQKPSLEFKEFVGLPCKNRPPFPRTGATRGAQEPCSVWEPPKRHRDGSAFQYEYEPPCTSLCARVQAVR

SEQ ID NO: 3505 - protein, 107 aa, Homo sapiens
MSHTSHLTLKICVIHRPTLRYLTLIAYRQHVRAPRGRCSHPDKKSAALVLRILFPRTEALPSTISLALAESSSPIASLSSTSHAALRPQGDGGRGVETRMEWNIFIK

SEQ ID NO: 3506 - protein, 331 aa, Homo sapiens
MLWLFQSLLFVFCFGPGNVVSQSSLTPLMVNGILGESVTLPLEFPAGEKVNFITWLFNETSLAFIVPHETKSPEIHVTNPKQGKRLNFTQSYSLQLSNLKMEDTGSYRAQISTKTSAKLSSYTLRILRQLRNIQVTNHSQLFQNMTCELHLTCSVEDADDNVSFRWEALGNTLSSQPNLTVSWDPRISSEQDYTCIAENAVSNLSFSVSAQKLCEDVKIQYTDTKMILFMVSGICIVFGFIILLLLVLRKRRDSLSLSTQRTQGPESARNLEYVSVSPTNNTVYASVTHSNRETEIWTPRENDTITIYSTINHSKESKPTFSRATALDNVV

SEQ ID NO: 3507 - protein, 160 aa, Homo sapiens
MPAISVSPSLQKYSKQQKLNTYEVNTKDLHRKISGSSVDAIAHCSAGQSSGLSFDFGPVLQNQQPFSQKTVECSQDHLWKVNYSIFNLLPWAMMSETQHGGRTSSCVGNLSEPPWRPPKWLWQSCRGGGNKKGDTWLSFLNQLTMGTHLYWNFRVRKYQN

SEQ ID NO: 3508 - protein, 162 aa, Homo sapiens
MKSCSLAGAGVQWHDFGSLQPPPPSFRRFSCLTLPRAGITGVHHHSWLIFVFLVQMRFHHVGQAGFELMTLSGLPALASQNAGITGMSYYAWPGLILEIDRLCVALATVQWLFTAVIMAHRSPKLKVGSSCLPISAFLVARTTGTLHHTQLVLGVLSKLDTW

SEQ ID NO: 3509 - protein, 145 aa, Homo sapiens
MAKEIKSNRQERGATGLVNSQTELVIGQWKVDCSTFPFLKVVCYKEPPLHVRAALDSLSFIHMSEGLCSRAMREEFATLRAVSWNPGAPFHVSLGAERVTHVWEWYVWQSMWAFGFLHWCAHILCPMIFNLDKEIDICFPHLGDK

SEQ ID NO: 3510 - protein, 606 aa, Homo sapiens [sequence omitted]

SEQ ID NO: 3511 - protein, 104 aa, Homo sapiens
MEMWERQLFLTTQPSPLPGGTPRNEALPLREFPATPSLGPGMAAVRAPAPSGDSLGTNYHRPWATSKAAHTDTPSLVTSPQEEGHPRKGGRLPGLEPLQGLTRH

SEQ ID NO: 3512 - protein, 103 aa, Homo sapiens
MEAGCKLKLKPPLYFSSTIGFESPDGSSYPHFKPCLLTISSCSLTQSPAMASSLSSTVKGRLFTQAHKTLDYHSPVILLSYCSLLYLSPLKPPWPPPILVSLH

SEQ ID NO: 3513 - protein, 244 aa, Homo sapiens
MSHRAWPTSALLNLSSLSLTLPQWLLYQPTKKAPLPTLAGQRAHSLPSHKPVPHAWALLRPKQPSSNSEENPELLLLTVVIHPLNAYCGSPETITWLASVNSHNSFQCYHSCVCPLLPWLSPRYFLQDSVPSLVSGFSRYLPMACLGPASGNPAWIVARKGCEDWMPPFVFVFSFIPSFLSSLPSFLPLSLSLSFFLSLFLFLCLFFFLFFRTCHPGWSAVAQSWLTTISASQIQAILRPQPPK

SEQ ID NO: 3514 - protein, 108 aa, Homo sapiens [sequence omitted]

SEQ ID NO: 3515 - protein, 110 aa, Homo sapiens
MEARPPPERGSLKIILTSLSSVLTSLDCILSFHLRSSWFWLASSDITPAEEREGTRCITAWSQGPRLICLHSTFQSLMFVLCILSRGFRSLSRKNREKYVYSSLMEVEFS

SEQ ID NO: 3516 - protein, 124 aa, Homo sapiens [sequence omitted]

SEQ ID NO: 3517 - protein, 145 aa, Homo sapiens [sequence omitted]

SEQ ID NO: 3518 - protein, 100 aa, Homo sapiens
MFKKNGSFRNDKLFHPITPNTCGSDSSLHLYILYLHWPDHPRTTYLTSAPFCLLTQHSLSLSFSLPLPLFLPRPSVTHTHTHTHTHRLHNAHRNVLIPFV

SEQ ID NO: 3519 - protein, 103 aa, Homo sapiens
MGGRSHPQPAGTRWRLKSLSTLTLVHLTGTLTSISKTWSLRTPCLQRLLISSRVLGIQGRGQPGWTGSWEGVSWQPPGQTDLPACQRQPVLPAPTRTSSQARC

SEQ ID NO: 3520 - protein, 105 aa, Homo sapiens
MRILVIPHLQQHLGYFTWFIICISLMTNERHFVIYVFDVYLSSIVKCLFKSFDHILIGQLFFLLLNYSPLSILNTIPSSDMRSVNIFSQAAACLFIFLLVYFVKF

SEQ ID NO: 3521 - protein, 128 aa, Homo sapiens
MSGSSRMGTTTSRSGSEPPAVRPAKARVRMPSRSMAPGSAPPRCGKGLGRALRPLPRSPCSPHSGTANATGQPAVPRKESQGRETPPRAASVHPAARASYLCLSKQSAPWELKYNRCQVQGRRFAAEN

SEQ ID NO: 3522 - protein, 103 aa, Homo sapiens [sequence omitted]

SEQ ID NO: 3523 - protein, 189 aa, Homo sapiens [sequence omitted]

SEQ ID NO: 3524 - protein, 143 aa, Homo sapiens [sequence omitted]

SEQ ID NO: 3525 - protein, 313 aa, Homo sapiens
MGAEASSSWCPGTALPEERLSVKRASEISGFLGQGSSGEAALDVLTHVLEGAGNKLTSSCGKPSSNRMSLQWTAVATFLYAEVFVVLLLCIPFISPKRWQKIFKSRLVELLVSYGNTFFVVLIVILVLLVIDAVREIRKYDDVTEKVNLQNNPGAMEHFHMKLFRAQRNLYIAGFSLLLSFLLRRLVTLISQQATLLASNEAFKKQAESASEAAKKYMEENDQLKKGAAVDGGKLDVGNAEVKLEEENRSLKADLQKLKDELASTKQKLEKAENQVLAMRKQSEGLTKEYDRLLEEHAKLQAAVDGPMDKKEE

SEQ ID NO: 3526 - protein, 151 aa, Homo sapiens
MEPALRWRTQTLSLKGRRRTGNSWAHPRDKRHRLNISPPPSPTNLPRRPAPTPPPRPDPPLAVGVTQGQRLRVPGDKVGHSSSLHPGPRNTHQRTAVRGRTRACVCVCVCVRARARAHTGQGSLIRNAGGTSSVSDFRFFHISECLHYIVS

SEQ ID NO: 3527 - protein, 361 aa, Homo sapiens
MCVWRLILDAVDGRECHHLVHCYMPQEIIAQPFLNFKVFLFNRFCTDCKNKVLRAYNILIGELDCSKEKGYCAALYEGLRCCPHERHIHVCCETDFIAHLLGRAEPEFAGGRRERHAKTIDIAQEEVLTCLGIHLYERLHRIWQKLRAEEQTWQMLFYLGVDALRKSFEMTVEKVQGISRLEQLCEEFSEEERVRELKQEKKRQKRKNRRKNKCVCDIPTPLQTADEKEVSQEKETDFIENSSCKACGSTEDGNTCVEVIVTNENTSCTCPSSGNLLGSPKIKKGLSPHCNGSDCGYSSSMEGSETGSREGSDVACTEGICNHDEHGDDSCVHHCEDKEDDGDSCVECWANSEENDTKGKN

SEQ ID NO: 3528 - protein, 130 aa, Homo sapiens [sequence omitted]

SEQ ID NO: 3529 - protein, 327 aa, Homo sapiens [sequence omitted]

SEQ ID NO: 3530 - protein, 182 aa, Homo sapiens [sequence omitted]

SEQ ID NO: 3531 - protein, 430 aa, Homo sapiens
MFDGYDSCSEDTSSSSSSEESEEEVAPLPSNLPIIKNNGQVYTYPDGKSGMATCEMCGMVGVRDAFYSKTKRFCSVSCSRSYSSNSKKASILARLQGKPPTKKAKVLQKQPLVAKLAAYAQYQATLQNQAKTKAAVSMEGFSWGNYINSNSFIAAPVTCFKHAPMGTCWGDISENVRVEVPNTDCSLPTKVFWIAGIVKLAGYNALLRYEGFENDSGLDFWCNICGSDIHPVGWCAASGKPLVPPRTIQHKYTNWKAFLVKRLTGAKTLPPDFSQKVSESMQYPFKPCMRVEVVDKRHLCRTRVAVVESVIGGRLRLVYEESEDRTDDFWCHMHSPLIHHIGWSRSIGHRFKRSDITKKQDGHFDTPPHLFAKVKEVDQSGEWFKEGMKLEAIDPLNLSTICVATIRKVTQNFLLNGLTTSGKLAPLQHQ

SEQ ID NO: 3532 - protein, 148 aa, Homo sapiens
MVEGRRALLGAWEAGFRAAWAVPPEGQDPTGGARAATPQTNEFKGATEEAPAKESPHTGEFKGAALVSPISKRMLERLSKFEVGDAENVASYELFGVFLVLLDVTLVLADLIFTDSKLYIPLEYRSISLAIALFFLMDVLLRVFVEGF

SEQ ID NO: 3533 - protein, 199 aa, Homo sapiens
MHACVNTPGSYRCTCPGGYRTLADGKSCEDVDECVGLQPVCPQGTTCINTGGSFQCVSPECPEGSGNVSYVKTSPFQCERNPCPMDSRPCRHLPKTISFHYLSLPSNLKTPITLFRMATASAPGRAGPNSLRFGIVGGNSRGHFVMQRSDRQTGDLILVQNLEGPQTLEVDVDMSEYLDRSFQANHVSKVTIFVSPYDF

SEQ ID NO: 3534 - protein, 100 aa, Homo sapiens [sequence omitted]

SEQ ID NO: 3535 - protein, 176 aa, Homo sapiens
MSMMSSRKTMKATIPPMMACPAHLRIFLEEDAVAPSTTRRQHWKQTQSNRTPSAWLLSTKQRGDQQDTNHKGTRTFSHCQSSSDWSGEIWGQRPELSALSLLLASYNSLVVLRQLPHAEVCPWSGNHPSRHSDPKNSDLLSLGGLALIPSTVLMSVSSKGASDVSPTMHFPYSEKR

SEQ ID NO: 3536 - protein, 203 aa, Homo sapiens
MDSAPAGSFSASSFFDLSVTVTRAKNSRGPSSSPSELQGAHCLTSSLAAACSVAYSALWSSSPLRSPWSISSITMPRLSSEESSASLLAGADGRPPRLLFLPFWVNLLRLVLFLRPRRPLLGFLAAPRSEPACPVTSPESWACVSEAGGVGASPGVPASAACVGPSSSSRRLICLRTLVSCARSFHRTLQTPSLPGISLGMAA

SEQ ID NO: 3537 - protein, 536 aa, Homo sapiens [sequence omitted]

SEQ ID NO: 3538 - protein, 472 aa, Homo sapiens [sequence omitted]

SEQ ID NO: 3539 - protein, 447 aa, Homo sapiens [sequence omitted]

SEQ ID NO: 3540 - protein, 145 aa, Homo sapiens
MLTRLVLSAHLSSTTSPPWTHAAISWELDNVLMPSPRIWPQVTPTGRSASVRSEGNTSSLWNFSAGQDVHAIVTRTCESVLSSAVYTHGCGCVRSATNITCQSSGQQRQAARQEEENSICKAHDSREGRLGYPLSAHQPGSGGPN

SEQ ID NO: 3541 - protein, 805 aa, Homo sapiens [sequence omitted]

SEQ ID NO: 3542 - protein, 296 aa, Homo sapiens
MGWGCRVPGWGGAALGRPDFGTGLRARVSGPGSAGFRAEKEGQRKRSGSPPAPASLPEYKPLEARFWVAAAQPFRSPLLPTDVYSCSLYFSLHSPVEPPRQRRGRVLLLSRLRLPPSHPTAQEELRARPWDGRSLGLLLARALPGVAAGPSPRRGGHSPGAAENEGSWAGMLNFPSPTFLSQLTGMCSSSARRPAPRRSTTRGLRNYKSLHPPRQGQERRGAGRSGARWWELGTNKGGCGERCLLCTGQFARYTCSLSNLRRNPVRHYCIQLRESLTTGQTSQSSQVVEMASNPEP

SEQ ID NO: 3543 - protein, 377 aa, Homo sapiens [sequence omitted]

SEQ ID NO: 3544 - protein, 1215 aa, Homo sapiens
MEIQVMIQFLPVILMQLFRVLTNMTHEDDVPINCTMVLLHIVSKCHEEGLDSYLRSFIKYSFRPEKPSAPQAQLIHETLATTMIAILKQSADFLSINKLLKYSWFFFEIIAKSMATYLLEENKIKLPRGQRFPETYHHVLHSLLLAIIPHVTIRYAEIPDESRNVNYSLASFLKRCLTLMDRGFIFNLINDYISGFSPKDPKVLAEYKFEFLQTICNHEHYIPLNLPMAFAKPKLQRVQDSNLEYSLSDEYCKHHFLVGLLLRETSIALQDNYEIRYTAISVIKNLLIKHAFDTRYQHKNQQAKIAQLYLPFVGLLLENIQRLAGRDTLYSCAAMPNSASRDEFPCGFTSPANRGSLSTDKDTAYGSFQNGHGIKREDSRGSLIPEGATGFPDQGNTGENTRQSSTRSSVSQYNRLDQYEIRSLLMCYLYIVKMISEDTLLTYWNKVSPQELINILILLEVCLFHFRYMGKRNIARVHDAWLSKHFGIDRKSQTMPALRNRSGVMQARLQHLSSLESSFTLNHSSTTTEADIFHQALLEGNTATEVSLTVLDTISFFTQCFKTQLLNNDGHNPLMKKVFDIHLAFLKNGQSEVSLKHVFASLRAFISKFPSAFFKGRVNMCAAFCYEVLKCCTSKISSTRNEASALLYLLMRNNFEYTKRKTFLRTHLQIIIAVSQLIADVALSGGSRFQESLFIINNFANSDRPMKATAFPAEVKDLTKRIRTVLMATAQMKEHEKDPEMLIDLQYSLAKSYASTPELRKTWLDSMAKIHVKNGDFSEAAMCYVHVAALVAEFLHRKKLFPNGCSAFKKITPNIDEEGAMKEDAGMMDVHYSEEVLLELLEQCVDGLWKAERYEIISEISKLIVPIYEKRREFEKLTQVYRTLHGAYTKILEVMHTKKRLLGTFFRVAFYGQSFFEEEDGKEYIYKEPKLTGLSEISLRLVKLYGEKFGTENVKIIQDSDKVNAKELDPKYAHIQVTYVKPYFDDKELTERKTEFERNHNISRFVFEAPYTLSGKKQGCIEEQCKRRTILTTSNSFPYVKKRIPINCEQQINLKPIDVATDEIKDKTAELQKLCSSTDVDMIQLQLKLQGCVSVQVNAGPLAYARAFLNDSQASKYPPKKVSELKDMFRKFIQACSIALELNERLIKEDQVEYHEGLKSNFRDMVKELSDIIHEQILQEDTMHSPWMSNTLHVFCAISGTSSDRGYGSPRYAEV

SEQ ID NO: 3545 - protein, 267 aa, Homo sapiens
MHYIKTWSLLGEMSEKLRRCRKELTAAIDRAFEGVSYSQECTGQQRLELSAAPLSFSLPVHRLLCRRHPLAACSSAAPFAAVPCAPENENPAFATNHAPVNAKPHALCPERKPLTSKENVLMHSSILAPERESWRTAGEGENWRKENLRKDMERDLKADSNMPLNNSSQEVTKDLLDMIDHTSIRTIEELAGKIEFENELNHMCGHCQDSPFKEEAWALLMDKSPQKATDADPGSLKQAFDDHNIVETVLDLEEDYNVMTSFKYQIE

SEQ ID NO: 3546 - protein, 184 aa, Homo sapiens
MGVCRTQYFVTQVLSLVPISYFSWSSPFSHPGTKFWTQLKFICQTLVKLGLFPPQESGIRDLIPGSVIDATMFNPCGYSMNGMKSDGTYWTIHITPEPEFSYVSFETNLSQTSYDDLIRKVVEVFKPGKFVTTLFVNQSSKCRTVLASPQKIEGFKRLDCQSAMFNDYNFVFTSFAKKQQQQQS

SEQ ID NO: 3547 - protein, 132 aa, Homo sapiens [sequence omitted]

SEQ ID NO: 3548 - protein, 115 aa, Homo sapiens
MACHFYLSTSAHQLMPLIHAPFCCSPLHSWQPLHSIHPFPQTWACCYQQGAVMDPSQGPLIPRASLSLGSSSQHCWSGGTHTHIFPKCYQCYGVIRNFIYLFFANMIAIKLPHLY

SEQ ID NO: 3549 - protein, 153 aa, Homo sapiens
MASPDPPATSYAPSDVPSGVALFLTIPFAFFLPELIFGFLVWTMVAATHIVYPLLQGWVMYVSLTSFLISLMFLLSYLFGFYKRFESWRVLDSLYHGTTGILYMSAAVLQVHATIVSEKLLDPRIYYINSAASFFAFIATLLYILHAFSIYYH

SEQ ID NO: 3550 - protein, 127 aa, Homo sapiens [sequence omitted]

SEQ ID NO: 3551 - protein, 117 aa, Homo sapiens [sequence omitted]

SEQ ID NO: 3552 - protein, 103 aa, Homo sapiens
MICYSLGLQPPLLPQHVLCTVAILSSFGSAPIVCSLKFLAPLSMSSVFRMPFSISSYLCPATLHLTSPLFKLFISPFLTLLGFSLRPKSFLQVLPKPPKSQLI

SEQ ID NO: 3553 - protein, 153 aa, Homo sapiens
MPSSVAGETSVLAVPSWRDHSVEPLRDPNPSDLLENLDDSVFSKRHAKLELDEKRRKRWDIQRIREQRILQRLQLRMYKKKGIQESEPEVTSFFPEPDDVESLMITPFLPVVAFGRPLPKLTPQNFELPWLDERSRCRLEIQKKQTPHRTCRK

SEQ ID NO: 3554 - protein, 1099 aa, Homo sapiens
MLRSDSENILTNYENQSRVETNERANECSHSKNIQNFPSDLIENPIMKSKMSKFYGVNETENEDNTNRDSPIFDYSPRLSALLSHDKLMHSQGSFNDTHTPESNGNKCEAPALSFSDKTMLSGQRIGEKFQDQFLGIAAINISLPGEQYGQKSLNMISSNPQVQYHNDKYISNTSGEDEKTHPGFQQMPEDKEDESEIEEYSCAVTPGGDTDNAIVSLTCATPLLDETISASDYETSLLNDQQNNTGTDTDSDDDFYDTPLFEDDDHDSLLLDGDDRDCLHPEDYDTLQEENDETASPADVFYDVSKENENSMVPQGAPVGSLSVKNKAHCLQDFLMDVEKDELDSGEKIHLNPVGSDKVNGQSLETGSERECTNILEGDESDSLTDYDIVGGKESFTASLKFDDSGSWRGRKEEYVTGQEFHSDTDHLDSMQSEESYGDYIYDSNDQDDDDDDGIDEEGGGIRDENGKPRCQNVAEDMDIQLCASILNENSDENENINTMILLDKVHSCSSLEKQQRVNVVQLASPSENNLVTEKSNLPEYTTEIAGKSKENLLNHEMVLKDVLPPIIKDTESEKTFGPASISHDNNNISSTSELGTDLANTKVKLIQGSELPELTDSVKGKDEYFKNMTPKVDSSLDHIICTEPDLIGKPAEESHLSLIASVTDKDPQGNGSDLIKGRDGKSDILIEDETSIQKMYLGEGEVLVEGLVEEENRHLKLLPGKNTRDSFKLINSQFPFPQITNNEELNQKGSLKKATVTLKDEPNNLQIIVSKSPVQFENLEEIFDTSVSKEISDDITSDITSWEGNTHFEESFTDGPEKELDLFTYLKHCAKNIKAKDVAKPNEDVPSHVLITAPPMKEHLQLGVNNTKEKSTSTQKDSPLNDMIQSNDLCSKESISGGGTEISQFTPESIEATLSILSRKHVEDVGKNDFLQSERCANGLGNDNSSNTLNTDYSFLEINNKKERIEQQLPKEQALSPRSQEKEVQIPELSQVFVEDVKDILKSRLKEGHMKPQEVEEPSACADTKILIQNLIKRITTSQLVNEASTVPSDSQMSDSSGVSPMTNSSELKPESRDDPFCIGNLKSELLLNILKQDQHS

SEQ ID NO: 3555 - protein, 265 aa, Homo sapiens
MQQTAPNTLPTASMSISGPGYSHAGPASQGVPMQGQGTIGNYVSRTNINMQSNPVSMMQQQAATSHYSSAQGGSQHYQGQSSIAMMGQGSQGSSMMGQRPMAPYRPSQQGSSQQYLGQEEYYGEQYSHSQGAAEPMGQQYYPDGHGDYAYQQSSYTEQSYDRSFEESTQHYYEGGNSQYSQQQAGYQQGAAQQQTYSQQQYPSQQSYPGQQQGYGSAQGAPSQYPGYQQGQGQQYGSYRAPQTAPSAQQQRPYGYEQGQYGNYQQ

SEQ ID NO: 3556 - protein, 133 aa, Homo sapiens
MFSYEKYTLFILSSSFFFFFRWSLALVTQAGVQWRNLSSLQPLPPGFKRFSCSSLPYSWDYRCLPPCPANFCVFSRDGVSPHRPGSLELLTSGDPPTLASLNTGITGVSHCIRPHFVFFNSVIGISFFFFFNV

SEQ ID NO: 3557 - protein, 309 aa, Homo sapiens
MSSCQGSLHGPRRPQPGASGRSTHTDGGGSSPAGEQEPSQHRTGAAVQRKPWPSGGLWRQDQQPGPGEAPHTQAFGEWPWGQELGSRAPGLGGDAGSPAPPFHSSSYRISLAGVEPSLVQAALGQLVRLSCSDDTAPESQAAWQKDGQPISSDRHRLQFDGSLIIHPLQAEDAGTYSCGSTRPGRDSQKIQLRIIGGDMAVLSEAELSRFPQPRDPAQDFGQAGAAGPLGAIPSSHPQPANRLRLDQNQPRVVDASPGQRIRMTCRAEGFPPPAIEWQRDGQPVSSPSTHRPAQGPWQGLRRPARAGQL

SEQ ID NO: 3558 - protein, 784 aa, Homo sapiens [sequence omitted]

SEQ ID NO: 3559 - protein, 289 aa, Homo sapiens
MKDRLEQLKAKQLTQDDDTDAVEIAIDNTAFMDEFFSEIEETRLNIDKISEHVEEAKKLYSIILSAPIPEPKTKDDLEQLTTEIKKRANNVRNKLKSMEKHIEEDEVRSSADLRIRKSQHSVLSRKFVEVMTKYNEAQVDFRERSKGRIQRQLEITGKKTTDEELEEMLESGNPAIFTSGIIDSQISKQALSEIEGRHKDIVRLESSIKELHDMFMDIAMLVENQGEMLDNIELNVMHTVDHVEKARDETKKAVKYQSQARKKLIIIIVLVVVLLGILALIIGLSVGLN

SEQ ID NO: 3560 - protein, 143 aa, Homo sapiens [sequence omitted]

SEQ ID NO: 3561 - protein, 1229 aa, Homo sapiens [sequence omitted]

SEQ ID NO: 3562 - protein, 104 aa, Homo sapiens [sequence omitted]

SEQ ID NO: 3563 - protein, 324 aa, Homo sapiens
MLRAFLFLSLFPHSQVLVYELLLGKGFRGGGGRWKALLGRHQARLKAELARLKVHRGVSRNEDLLEVGSRPGPASQLPRFVRVNTLKTCSDDVVDYFKRQGFSYQGRASSLDDLRALKGKHFLLDPLMPELLVFPAQTDLHEHPLYRAGHLILQDRASCLPAMLLDPPPGSHVIDACAAPGNKTSHLAALLKNQGSLPLTWMPSGWHPWPRCWPGLASLAVNWLRRTSWRSPPRIHATMRSTTSCWILPAVARVCRADSWRSPGQAHLARCVCMPWQGSSSEPCATRSLSLPCSGSSTPRAPSARRRMKTWCEMRCSRTRAPSG

SEQ ID NO: 3564 - protein, 130 aa, Homo sapiens [sequence omitted]

SEQ ID NO: 3565 - protein, 121 aa, Homo sapiens
MSLTFRRPKTLRLRRQPRYPRKSTPTRNKLGHYAIIKFPLATESAVKKIEENNTLVFTVDVKDNKHQIRQAVKKVYDSDVAKVTTLICPDKEKKAYVRLAPDYDAFDVVTKLGSPKLSPAG

SEQ ID NO: 3566 - protein, 102 aa, Homo sapiens [sequence omitted]

SEQ ID NO: 3567 - protein, 203 aa, Homo sapiens
MWSAASTPPGTAASSPTTQHPGKWSRSWWPLGSRPLASVPSTTWAPTPSASPSSSCSGSQGSRGHGRGHLEGEVLPSMGVVSLCTPNQEPDAESQGKQGPLKSRNLLGPPSGLPWGLQDHWGSTVSGWLQLLSYWYCCARGEGMRGSARKERRVSSSDTAVCSEKTPVPRIVEIEVGREEVRERRLWPQGQLTTNPLPTQALS

SEQ ID NO: 3568 - protein, 135 aa, Homo sapiens
MNLKRYFEQKHRTEASVPAPQAACVPGYPVPSDPGEAGLSCTGSSGTGYCASQFSVISHLRTIFLPELRPLPRLSLEDTNNEDTNNEHLLGSPEDPHMEAAQPSPYPEAHRLHKPRPGPSLMAHRQVLRTPTALL

SEQ ID NO: 3569 - protein, 534 aa, Homo sapiens [sequence omitted]

SEQ ID NO: 3570 - protein, 139 aa, Homo sapiens
MAPEDPASLRHGLWHQRTQPLAPWTMAAEDPAPRILDYGSRGPSLPASWTKAPEDPAPSGPGLWQQRTQPLASWTMAPEDPASLRHGLWHQRTQPLAPWTMAAEDPAPWRPGLRHSRTPQHRVLLHRRTLAGLRPGLSY

SEQ ID NO: 3571 - protein, 345 aa, Homo sapiens
MDGEQLEGASSEKREREAAEEGLASVKRPRREALSNDTTESLAANSRGREKPRPLHALAAGFSPPVNVTVSPRSEESHTTTVSGGNGSVFQAGPQLQALANLEARRGSIGAALSSRDVSGLPVYAQSGEPRRLTQAQVAAFPGENALEHSSDQDTWDSLRSPGFCSPLSSGGGAESLPPGGPGHAEAGHLGKVCDFHLNHQQPSPTSVLPTEVAAPPLEKILSVDSVAVDCAYRTVPKPGPQPGPHGSLLTEGCLRSLSGDLNRFPCGMEVHSGQRELESVVAVGEAMAFEISNGSHELLSQGQKQIFIQTSDGLILSPPGTIVSQEEDIVTVTDAEGRACGWAR

SEQ ID NO: 3572 - protein, 484 aa, Homo sapiens
MEAEEAQRGASPPISAIEEFSIIPEAPMRSSQVSALGLEAQEDEDPSYKWREEHRLSATQQSELRDVCDYAIETMPSFPKEGSADVEPNQESLVAEACDTPEHWEAVPQSLAGRQARTLAPPELWACPIQSEHLDMAPFSSDLGSEEEEVEFWPGLTSLTLGSGQAEEEEETSSDNSGQTRYYSPCEEHPAETNQNEGAESGTIRQGEELPSEELQESQGLLHPQEVQVLEEQGQQEAGFRGEGTLREDVCADGLLGEEQMIEQVNDEKGEQKQKQEQVQDVMLGRQGERMGLTGEPEGLNDGEWEQEDMERKAQGQGGPEQGEERKRELQVPEENRADSQDEKSQTFLGKSEEVTGKQEDHGIKEKGVPVSGQEAKEPESWDGGRLGAVGRARSREEENEHHGPSMPALIAPEDSPHCDLFPGASYLVTQIPGTQTESRAEELSPAALSPLLEPIRCSHQPISLLGSFLTEESPDKEKLLSVL

SEQ ID NO: 3573 - protein, 165 aa, Homo sapiens [sequence omitted]

SEQ ID NO: 3574 - protein, 275 aa, Homo sapiens; identical to SEQ ID NO: 2440

SEQ ID NO: 3575 - protein, 125 aa, Homo sapiens
MQPVISALNIQTQTVQTHPAPRNTSEHCTLPACDAQEEHRDTVDGSIARTESASGEIWRQTHMDGEHHVNTKAEISVMSANQGAPRITSKPPEARREARDRSLPSAFSLRGLTDTLILGFCPPEL

SEQ ID NO: 3576 - protein, 327 aa, Homo sapiens
MSLMTRENLAFRGSLMGCSELKPFQELTHQSAVSHSRADVADVWWYCGGPLLDTLPSNWSGTCTLVQFAIPFALAFLQPEKEKPQHRKIREAPYGSFDSQVYLDATGVPQGVPHKFKAQDQIAAGFESIFWWVTISKNIDWINYIYYNQQRFINYTRDAVKGIAEQLGPTSQMAWENRMALDMILAKKGGVCVMIKTQCCTFIPNNTAPSGSITRALQGLTALSNELAKNSGVNDPFSGWLERWFGKWKGIIASILTSLAAVIGVVILFGCCVTPCIRGLVQRLIETVLTKTSLSSPPPYSDKLFLLEDQVEQQSQDLLKRFEEEGP

SEQ ID NO: 3577 - protein, 122 aa, Homo sapiens
MLVLTSAIPQAKHSFYQAHCLAGGRKFHRLSLGSFCRNNPYSSGQGANVSIQLAAKNVYPNKQGRPTDPLDPLEMDLGHSAFHDFSKQRGVVILSKSWRQCQCPATHHVPVLEKPLCTPLCW

SEQ ID NO: 3578 - protein, 116 aa, Homo sapiens
MLHGLGPVPPPLWAAVSASRWGGGGPQPLPQVSKEGSGLARPDPSCCVRAGLGAAKTPGAQGERLGPRGTRRARGLQLRPVGGQSRREAAPACSGPQPCRPHGTGAASSLGLQDAD

SEQ ID NO: 3579 - protein, 169 aa, Homo sapiens
MLQSEIQAMKKLRHKHILALYAVVSVGDPVYIITELMAKGSLLELLRDSDEKVLPVSELLDIAWQVAEGMCYLESQNYIHRDLAARNILVGENTLCKVGDFGLARLIKEDVYLSHDHNIPYKWTAPEALSRGHYSTKSDVWSFGILLHEMFSRGQVPYPGTVPTVPDWA

SEQ ID NO: 3580 - protein, 263 aa, Homo sapiens
MPIAAFGQKQRPSRFFMTPPRLHYTPPLQSPIIDNDPLLGQSPWRSKISGSDTETLGGFPVEFLIQVTRLSKILMIKKEHIKKLREMNTEAEKLKSYSMPISIEFQRRYATIVLELEQLNKDLNKVLHKVQQYCYELAPDQGLQPADQPTDMRRRCEEEAQEIVRHANSSTGQPCVENENLTDLISRLTAILLQIKCLAEGGDLNSFEFKSLTDSLNDIKSTIDASNISCFQNNVEIHVAHIQSGLSQMGNLHAFAANNTNRD

SEQ ID NO: 3581 - protein, 440 aa, Homo sapiens [sequence omitted]

SEQ ID NO: 3582 - protein, 105 aa, Homo sapiens
MFLVTNSIWPDFKVSHPSFCQLGICVNVLILMKWSFLSQLIFLVIDSICLLLKLVTSFCLLDIYMVCHPFSLNKSRSLCFKVHFLQKAYRHFFILSLNPCMRNSV

SEQ ID NO: 3583 - protein, 301 aa, Homo sapiens
MCVWRLILDAVDGRECHHLVHCYMPQEIIAQPFLNFKVFLFNRFCTDCKNKVLRAYNILIGELDCSKEKGYCAALYEGLRCCPHERHIHVCCETDFIAHLLGRAEPEFAGGRRERHAKTIDIAQEEVLTCLGIHLYERLHRIWQKLRAEEQTWQMLFYLGVDALRKSFEMTVEKVQGISRLEQLCEEFSEEERVRELKQEKKRQKRKNRRKNKCVCDIPTPLQTADEKEVSQEKETDFIENSSCKACGSTEDGNTCVEVIVTNENTSCTCPSSGNLLGSPKIKKGLSPHCNGSDCGYSSSM

SEQ ID NO: 3584 - protein, 321 aa, Homo sapiens
MSVQEAGATSPPARILKEPGPAQPLSAGPEWDRGRGVRRRCGPGVLLGASSVSWGLATSGHQGRGCGDGGGARVPTKSVPGGGPRASRSVREVAGGGFACNPGKGPAAVRLALGGGWKISKSPIPVQMAAGAAGCRTQARGQRLTSRGRESPEATGVPERRGDPETRRNRKSLTPGSGEFGVRSQSCDSTVPESLERALWAQSSQLAGGPGLAPRPGASGRGRWVSAPLPPKGTETFFCVLPSALRAALSCGPSWGEDSGPRHRELRPDPDSRRASAERSPRCPPGSPRKAGPGRRDARGAALGGAFRVLAGRALLRRGME

SEQ ID NO: 3585 - protein, 278 aa, Homo sapiens [sequence omitted]

SEQ ID NO: 3586 - protein, 120 aa, Homo sapiens [sequence omitted]

SEQ ID NO: 3587 - protein, 499 aa, Homo sapiens
MTEESSDVPRELIESIKDVIGRKIKISVKKKVKLEVKGDKVENKVLVLTSCRAFLVTARIPTKLELTFSYLEIHGVVCSKSAQMIVETEKCSISMKMASPEDVSEVLAHIGTCLRKIFPGLSPVRIMKKVSMEPSERLASLQALWDSQTVAEQGPCGGFSQMYACVCDWLGFSYREEVQWDVDTIYLTQDTRELNLQDFSHLDHRDLIPIIAALEYNQWFTKLSSKDLKLSTDVCEQILRVVSRSNRLEELVLENAGLRTDFAQKLASALAHNPNSGLHTINLAGNPLEDRGVSSLSIQFAKLPKGLKHLNLSKTSLSPKGVNSLSQSLSANPLTASTLVHLDLSGNVLRGDDLSHMYNFLAQPNAIVHLDLSNTECSLDMVCGALLRGCLQYLAVLNLSRTVFSHRKGKEVPPSFKQFFSSSLALMHINLSGTKLSPEPLKALLLGLACNHNLKGVSLDLSNCELRSGGAQVLEGCIAEIHNITQLGTRYRNAVLRVY

SEQ ID NO: 3588 - protein, 131 aa, Homo sapiens
MLLFNWICIVITGLAMDMQLLMIPLIMSVLYVWAQLNRDMIVSFWFGTRFKACYLPWVILGFNYIIGGSYPMDLGGRNFLSTPQFLYRWLPSRRGGVSGFGVPPASMRRAADQNGGGGRHNWGQGFRLGDQ

SEQ ID NO: 3589 - protein, 352 aa, Homo sapiens
MHTQPLKEAKRMPDRPIKWDKSYYSFTGFKDPDEDLEQVSRVETTLTSWLDNNGKSAVKKLKNSLPLRKELDRLKDELSHQLQLSDIRWQRSWGIAHRCSQLHSLSRLAQQNLETLKKAKGCTIIFTDRSGMSAVGHVMLGTMDVHHHWTKLFERLPSYFDLQRRLMILEDQISYLLGGIQVVYIEELQPVLTLEEYYSLLDVFYNRLLKSRILFHPRSLRGLQMILNSDRYAPSLHELGHFNIPTLCDPANLQWFILTKAQQARENMKRKEELKVIENELIQASTKKFSLEKLYKEPSISSIQMVDCCKRLLEQSLPYLHGMHLCISHFYSVMQDGDLCIPWNWKNGEAIK

SEQ ID NO: 3590 - protein, 115 aa, Homo sapiens
MAAAPDYPAPFYPSSGRNPSPRPFPLKGNGPKVGRAARLPRSIQVKRESDQTGEPRGPIFRDLTGHLDRPLQLGTFQENEGNVVIAPEPHSSSEVLFTSLWKKIGYLFLVERVEI

SEQ ID NO: 3591 - protein, 127 aa, Homo sapiens [sequence omitted]

SEQ ID NO: 3592 - protein, 161 aa, Homo sapiens [sequence omitted]

SEQ ID NO: 3593 - protein, 113 aa, Homo sapiens
MPLGAGGLGRLARGLTSGVEGNGIKATEFPGPGPERYPCLHLALPCAWLSPSSWAHSHVPPITRHLHFCWCFWESDLQTASASPGSLLSGAFSRTVKQTLGARPRDPHFKYKV

SEQ ID NO: 3594 - protein, 100 aa, Homo sapiens [sequence omitted]

SEQ ID NO: 3595 - protein, 418 aa, Homo sapiens
MLENHILHKRIYILTFFSQQIFILCHAHFIFFFTVRDFCRQDEKCDYYFSVDADVVLTNPRTLKILIEQNRKIIAPLVTRHGKLWSNFWGALSPDGYYARSEDYVDIVQGNRVGVWNVPYMANVYLIKGKTLRSEMNERNYFVRDKLDPDMALCRNAREMTLQREKDSPTPETFQMLSPPKGVFMYISNRHEFGRLLSTANYNTSHYNNDLWQIFENPVDWKEKYINRDYSKIFTENIVEQPCPDVFWFPIFSEKACDELVEEMEHYGKWSGGKHHDSRISGGYENVPTDDIHMKQVDLENVWLHFIREFIAPVTLKVFAGYYTKGFALLNFVVKYSPERQRSLRPHHDASTFTINIALNNVGEDFQGGGCKFLRYNCSIESPRKGWSFMHPGRLTHLHEGLPVKNGTRYIAVSFIDP

SEQ ID NO: 3596 - protein, 223 aa, Homo sapiens [sequence omitted]

SEQ ID NO: 3597 - protein, 310 aa, Homo sapiens
MDWTWRVLCVLAVAPGARLQVQLTQSGAALKKPGASLKLSCRASADSSITYNIHWLRRPPGQGFEWLGKINSRDSITNSAPRFQGSVTMTRDRSSSTFYLDLRSLRSDDTAVYYCTRSIWPLDYFDSWGQGTQVTVSPAPTKAPDVFPIISGCRHPKDNSPVVLACLITGYHPTSVTVTWYMGTQSQPQRTFPEIQRRDSYYMTSSQLSTPLQQWRQGEYKCVVQHTASKSKKEIFRWPESPKAQASSVPTAQPQAEGSLAKATTAPATTRNTGRGGEEKKKEKEKEEQEERETKTQSVRATPSLLASTC

SEQ ID NO: 3598 - protein, 324 aa, Homo sapiens
MPTTPVKAKRVSTFQEFESNTSDAWDAGEDDDELLAMAAESLNSEVVMETANRVLRNHSQRQGRPTLQEGPGLQQKPRPEAEPPSPPSGDLRLVKSVSESHTSCPAESASDAAPLQRSQSLPHSATVTLGGTSDPSTLSSSALSEREASRLDKFKQLLAGPNTDLEELRRLSWSGIPKPVRPMTWKLLSGYLPANVDRRPATLQRKQKEYFAFIEHYYDSRNDEVHQDTYRQIHIDIPRMSPEALILQPKVTEIFERILFIWAIRHPASGYVQGINDLVTPFFVVFICEYIAFPGCGRPQIPILAVIWRDEPYPRTDEQIILRR

SEQ ID NO: 3599 - protein, 407 aa, Homo sapiens
MNMIWRNSISCLRLGKVPHRYQSGYHPVAPLGSRILTDPAKVFEHNMWDHMQWSKEEEAAARKKVKENSAVRVLLEEQVKYEREASKYWDTFYKIHKNKFFKDRNWLLREFPEILPVDQKPEEKARESSWDHVKTSATNRFSRMHCPTVPDEKNHYEKSSGSSEGQSKTESDFSNLDSEKHKKGPMETGLFPGSNATFRILEVGCGAGNSVFPILNTLENSPESFLYCCDFASGAVELVKSHSSYRATQCFAFVHDVCDDGLPYPFPDGILDVILLVFVLSSIHPDRMQGVVNRLSKLLKPGGMLLFRDYGRYDKTQLRFKKGHCLSENFYVRGDGTRAYFFTKGEVHSMFCKASLDEKQNLVDRRLQVNRKKQVKMHRVWIQGKFQKPLHQTQNSSNMVSTLLSQD

SEQ ID NO: 3600 - protein, 144 aa, Homo sapiens
MVCPEFVPSDVQMCLEFLPSGGFVVSLDFRSEATELCSVTALKGARLELLVPPDGFVALLTSGMKPQTLTVSVTAHKGSADPEEAAAKFIVKSKRTKLPQHETAPQRIATAAWVASFYSLTWPHPHPADWSILQRGDWSVFTQC

SEQ ID NO: 3601 - protein, 150 aa, Homo sapiens [sequence omitted]

SEQ ID NO: 3602 - protein, 163 aa, Homo sapiens
MGSSLGLCLGKAPSSSQLFLFFAMGSDVQPGTEMEIVVEETISVRDCLKLMLKKSGLQGDAWHLRKMDWCYEAGEPLCEEDATLKELLICSGDTLLLIEGQLPPLGFLKVPIWWYQLQGPSGHWESHQDQTNCTSSWGRVWRATSSQGENRMGFQQPVHHKEK

SEQ ID NO: 3603 - protein, 165 aa, Homo sapiens
MVTKWWGQDPPVQLRSQLMLWIMELILWKFQSSVVGSSVVTWKISDVAGPHGDHSCSLQHLEQIIGSVSNYPRYTGSRSCDRGENPVSLSKRIKCTWMLGASGFPPRCPSGRDHSRDHPGKSQVPALELANQLAAWGLWSSVVKSWGFRAGETEAPISALSSAHA

SEQ ID NO: 3604 - protein, 107 aa, Homo sapiens [sequence omitted]

SEQ ID NO: 3605 - protein, 402 aa, Homo sapiens
MCELDILHDSLYQFCPELHLKRLNSLTLACHALLDCKTLTLTELGRNLPTKARTKHNIKRIDRLLGNRHLHKERLAVYRWHASFICSGNTMPIVLVDWSDIREQKRLMVLRASVALHGRSVTLYEKAFPLSEQCSKKAHDQFLADLASILPSNTTPLIVSDAGFKVPWYKSVEKLGWYWLSRVRGKVQYADLGAENWKPISNLHDMSSSHSKTLGYKRLTKSNPISCQILLYKSRSKGRKNQRSTRTHCHHPSPKIYSASAKEPWVLATNLPVEIRTPKQLVNIYSKRMQIEETFRDLKSPAYGLGLRHSRTSSSERFDIMLLIALMLQLTCWLAGVHAQKQGWDKHFQANTVRNRNVLSTVRLGMEVLRHSGYTITREDLLVAATLLAQNLFTHGYALGKL

SEQ ID NO: 3606 - protein, 116 aa, Homo sapiens
MLSLLFLCTLHLSLSLPSLRLTLTPIRLSSLPGLCCRKVPGTALITSAKLFLMIYFLSTPPLLTLFNILMTFFFVAPPLNLLNKTYFCSFSIYSPKDIGYPPPKLKFLLHPLPTSA

SEQ ID NO: 3607 - protein, 217 aa, Homo sapiens [sequence omitted]

SEQ ID NO: 3608 - protein, 777 aa, Homo sapiens
MLDMSFKDAERGDDTSCENLLDAFSIKLSETHGYGVQEEFTEENKLLEACIFKNNELLKNIQDVQSQISKIGLKDPTVPAVKHRKKSLIRLDKVLDEYEEEKRHLQEMANSLPHFKDGREKTVNQQCQNTVVLWENTKALVTECLEQCGRVLELLKQYQNFKSILTTLIQKEESVISLQASYMGKENLKKRIAEIEIVKEEFNEHLEVVDKINQVCKNLQFYLNKMKTFEEPPFEKEANIIVDRWLDINEKTEDYYENLGRALALWDKLFNLKNVIDEWTEKALQKMELHQLTEEDRERLKEELQVHEQKTSEFSRRVAEIQFLLQSSEIPLELQVMESSILNKMEHVQKCLTGESNCHALSGSTAELREDLDQAKTQIGMTESLLKALSPSDSLEIFTKLEEIQQQILQQKHSMILLENQIGCLTPELSELKKQYESVSDLFNTKKSVLQDHFSKLLNDQCKNFNDWFSNIKVNLKECFESSETKKSVEQKLQKLSDFLTLEGRNSKIKQVDSVLKHVKKHLPKAHVKELISWLVGQEFELEKMESICQARAKELEDSLQQLLRLQDDHRNLRKWLTNQEEKWKGTEEPGEKTELFCQALARKREQFESVAQLNNSLKEYGFTEEEEIIMEATCLMDRYQTLLRQLSEIEEEDKLLPTEDQSFNDLAHGVIHWIKEIKESLMVLNSSEGKMPLEERIQKIKEIILLKPEGDARIETITKQAESSEAPLVQKTLTDISNQWDNTLHLASTYLSHQEKLLLEGEKYLQSKEDLRLMLI

SEQ ID NO: 3609 - protein, 274 aa, Homo sapiens
MLEDIASPRPPAEGFIDETPNFIIPAQRAEPMRIVRQPTPPPGDLEPPFQPSALPADPLESPPTAPDPALELPSTPPPSSLLRPRLSPWGLAPLFRSVRSKLESFADIFLTPNKTPQPPPPSPPMKLELKIAISEAEQSGAAEGTASVSPRPPIRQWRTQDHNTPALLPKPSLGRSYSCPDLGPPGPGTCTWPPAPPQPSRPRPRRHTVGGGEMARAPPPPRPCLRKEVFPLGGVGASPSLTTSCSSTASTSFSGPAEPREGAKSLKGPGAFRT

SEQ ID NO: 3610 - protein, 497 aa, Homo sapiens
MDNRQNVTPALIFAITVATIGSFQFGYNTGVINAPETIIKEFINKTLTDKANAPPSEVLLTNLWSLSVAIFSVGGMIGSFSVGLFVNRFGRRNSMLIVNLLAATGGCLMGLCKIAESVEMLILGRLVIGLFCGLCTGFVPMYIGEISPTALRGAFGTLNQLGIVIGILVAQIFGLELILGSEELWPVLLGFTILPAILQSAALPCCPESPRFLLINRKKEENATRILQRLWGTQDVSQDIQEMKDESARMSQEKQVTVLELFRVSSYRQPIIISIVLQLSQQLSGINAVFYYSTGIFKDAGVQQPIYATISAGVVNTIFTLLSLFLVERAGRRTLHMIGLGGMAFCSTLMTVSLLLKNHYNGMSFVCIGAILVFVACFEIGPGPIPWFIVAELFSQGPRPAAMAVAGCSNWTSNFLVGLLFPSAAYYLGAYVFIIFTGFLITFLAFTFFKVPETRGRTFEDITRAFEGQAHGADRSGKDGVMGMNSIEPAKETTTNV

SEQ ID NO: 3611 - protein, 888 aa, Homo sapiens
MLLNGDCPESLKKEAAAAEPPRENGLDEAGPGDETTGQEVIVIQDTGFSVKILAPGIEPFSLQVSPQEMVQEIHQVLMDREDTCHRTCFSLHLDGNVLDHFSELRSVEGLQEGSVLRVVEEPYTVREARIHVRHVRDLLKSLDPSDAFNGVDCNSLSFLSVFTDGDLGDSGKRKKGLEMDPIDCTPPEYILPGSRERPLCPLQPQNRDWKPLQCLKVLTTSGWNPPPGNRKMHGDLMYLFVITAEDRQVSITASTRGFYLNQSTAYHFNPKPASPRFLSHSLVELLNQISPTFKKNFAVLQKKRVQRHPFERIATPFQVYSWTAPQAEHAMDCVRAEDAYTSRLGYEEHIPGQTRDWNEELQTTRELPRKNLPERLLRERAIFKVHSDFTAAATRGAMAVIDGNVMAINPSEETKMQMFIWNNIFFSLGFDVRDHYKDFGGDVAAYVAPTNDLNGVRTYNAVDVEGLYTLGTVVVDYRGYRVTAQSIIPGILERDQEQSVIYGSIDFGKTVVSHPRYLELLERTSRPLKILRHQVLNDRDEEVELCSSVECKGIIGNDGRHYILDLLRTFPPDLNFLPVPGEELPEECARAGFPRAHRHKLCCLRQELVGAFVEHRYLLFMKLAALQLMQQNASQLETPSSLENGGPSSLESKSEDPPGQEAGSEEEGSSASGLAKVKELAETIAADDGTDPRSREVIRNACKAVGSISSTAFDIRFNPDIFSPGVRFPESCQDEVRDQKQLLKDAAAFLLSCQIPGLVKDCMEHAVLPVDGATLAEVMRQRGINMRYLGKVLELVLRSPARHQLDHVFKIGIGELITRSAKHIFKTYLQGVELSGLSAAISHFLNCFLSSYPNPVAHLPADELVSKERNKRRKTGPRGLQITQPGLS

SEQ ID NO: 3612 - protein, 101 aa, Homo sapiens
MRDTGSCLSLNIPPAGGHKGADAADVSSGAMGHRHPAGSEAAESPGVTFPAGTRNTGSCTFPLSRRRWVITGFTSFPLQMPDGPGMTAASGKLYQFRHPVR

SEQ ID NO: 3613 - protein, 149 aa, Homo sapiens
MVLLLLSLDFWSVKNVTGRLLVGLRWWNQIDEDGKSHWIFEARKVSPNSIAATEAEARIFWLGLIICPMIWIVFFFSTLFSLKLKWLALVVAGISLQAANLYGYILCKMGGNSDIGKVTASFLSQTVFQTACPGDFQKPGLEGLEIHQH

SEQ ID NO: 3614 - protein, 626 aa, Homo sapiens
MPHIGDWWEAVSETVRATFLTLLQDIPSFSPIFLLSTSETMYSELPEEVKCIFRIQYEEVLYIQRPIEEDRRKFFQELILNQASMAPPRRKHAALCAMEVLPLALPSPPRQLSESEKSRMEDQEENTLRELRLFLRDVTKRLATDKRFNIFSKPVDIEEVSDYLEVIKEPMDLSTVITKIDKHNYLTAKDFLKDIDLICSNALEYNPDKDPGDKIIRHRACTLKDTAHAIIAAELDPEFNKLCEEIKEARIKRGLSVTSEQINPHSTGARKTETRVEEAFRHKQRNPMDVWHNSANKCAFRVRRKSRRRSQWGKGIIKKRKVNNLKKDEEDTKFADYENHTEDRKLLENGEFEVSTDCHEENGEETGDLSMTNDESSCDIMDLDQGQRLNNGAGTKENFASTEEESSNESLLVNSSSSLNPEQTSRKETFLKGNCLNGEASTDSFEGIPVLECQNGKLEVVSFCDSGDKCSSEQKILLEDQSKEKPETSTENHGDDLEKLEALECSNNEKLEPGSDVEVKDAELDKEGASKVKKYRKLILEQAKTTSLELVPEEPSEPVPPLIVDRERLKKLLDLLVDKSNNLAVDQLERLYSLLSQCIYRHRKDYDKSQLVEEMERTVHMFETFL

SEQ ID NO: 3615 - protein, 131 aa, Homo sapiens
MDMFTCLCVRTYSRVCDTAIFTRLCDTAIFTRLCDTDIHAFVCRTYSHICVYGHIHAFVIQTYSRICVYRHSRVCVIRIYSRICDTDIFTRLCDTAIFTCLCDTDIHAFVCRTYSRVCVYRHIHSLERVES

SEQ ID NO: 3616 - protein, 929 aa, Homo sapiens
MTASSVEQLRKEGNELFKCGDYGGALAAYTQALGLDATPQDQAVLHRNRAACHLKLEDYDKAETEASKAIEKDGGDVKALYRRSQALEKLGRLDQAVLDLQRCVSLEPKNKVFQEALRNIGGQIQEKVRYMSSTDAKVEQMFQILLDPEEKGTEKKQKASQNLVVLAREDAGAEKIFRSNGVQLLQRLLDMGETDLMLAALRTLVGICSEHQSRTVATLSILGTRRVVSILGVESQAVSLAACHLLQVMFDALKEGVKKGFRGKEGAIIVDPARELKVLISNLLDLLTEVGVSGQGRDNALTLLIKAVPRKSLKDPNNSLTLWVIDQGLKKILEVGGSLQDPPGELAVTANSRMSASILLSKLFDDLKCDAERENFHRLCENYIKSWFEGQGLAGKLRAIQTVSCLLQGPCDAGNRALELSGVMESVIALCASEQEEEQLVAVEALIHAAGKAKRASFITANGVSLLKDLYKCSEKDSIRIRALVGLCKLGSAGGTDFSMKQFAEGSTLKLAKQCRKWLCNDQIDAGTRRWAVEGLAYLTFDADVKEEFVEDAAALKALFQLSRLEERSVLFAVASALVNCTNSYDYEEPDPKMVELAKYAKQHVPEQHPKDKPSFVRARVKKLLAAGVVSAMVCMVKTESPVLTSSCRELLSRVFLALVEEVEDRGTVVAQGGGRALIPLALEGTDVGQTKAAQALAKLTITSNPEMTFPGERIYEVVRPLVSLLHLNCSGLQNFEALMALTNLAGISERLRQKILKEKAVPMIEGYMFEEHEMIRRAATECMCNLAMSKEVQDLFEAQGNDRLKLLVLYSGEDDELLQRAAAGGLAMLTSMRPTLCSRIPQVTTHWLEILQALLLSSNQELQHRGAVVVLNMVEASREIASTLMESEMMEILSVLAKGDHSPVTRAAAACLDKAVEYGLIQPNQDGE

SEQ ID NO: 3617 - protein, 527 aa, Homo sapiens
MECLCAHPPAGLQHLGLGHNKLLGPLESLYVTANHWGRVRLGLGDAVLTAAACVFLLFSELRSICFLVCGSRLLAPCSPGFLTPRRSCSPSRPNLVSLDLGFNDLTDLQSMVTSLRTLRHLRLLVLKGNPLALVPYYRGLTIDSLAQLCVLDDITVSPNEKHLFRGLSLNGDLLAQEAQFVVTIGNIRGVLDTSVLDPEPRPEGPFITYNYYVTYDFVKDEEGEMNESAGVLAEIVKPSPSLELLVEESPEEVVEDVIEDIVEEVTEEVEGSLESEVEESGESELSVISGPSTILQMPRASAEELAKLRLRIDPRLCPSPGTVLFSTAHKPWAEVIPCSYEMQHSLRDLVPLKAFLLAGTTVTIVEEKILSWPVVLPAVDSPLSAKKGKGEKDKKGKEKDRTGKGEKEPAKEWKVLKKKKEPPKELRQNPPILQVLGRGLVILEPLLAGEPLVSTVCNFGVVRTLTSDRLTLARDSKKIKKVAKKEKPKAVIPIYEGDYHPEPLTVEVQIQLNQCRSAEEALRMFAV

SEQ ID NO: 3618 - protein, 115 aa, Homo sapiens
MRKAYSPLQVLRGCLLLPSLLHALSLQEQPMVWPLTRGPSSASDALSSGGPYHPSECCFTYTTYKIPRQRIMDYYETNSQCSKPGIVFITKRGHSVCTNPSDKWVQDYIKDMKEN

SEQ ID NO: 3619 - protein, 528 aa, Homo sapiens [sequence omitted]

SEQ ID NO: 3620 - protein, 279 aa, Homo sapiens
MFRLWLLLAGLCGLLASRPGFQNSLLQIVIPEKIQTNTNDSSEIEYEQISYIIPIDEKLYTVHLKQRYFLADNFMIYLYNQGSMNTYSSDIQTQCYYQGNIEGYPDSMVTLSTCSGLRGILQFENVSYGIEPLESAVEFQHVLYKLKNEDNDIAIFIDRSLKEQPMDDNIFISEKSEPAVPDLFPLYLEMHIVVDKTLYDYWGSDSMIVTNKVIEIVGLANSMFTQFKVTIVLSSLELWSDENKISTVGEADWREMKSVIVVLRLNVDLQAVVIFELVY

SEQ ID NO: 3621 - protein, 161 aa, Homo sapiens [sequence omitted]

SEQ ID NO: 3622 - protein, 514 aa, Homo sapiens
MGDWNLLGDTLEEVHIHSTMIGKIWLTILFIFRMLVLGVAAEDVWNDEQSGFICNTEQPGCRNVCYDQAFPISLIRYWVLQVIFVSSPSLVYMGHALYRLRVLEEERQRMKAQLRVELEEVEFEMPRDRRRLEQELCQLEKRKLNKAPLRGTLLCTYVIHIFTRSVVEVGFMIGQYLLYGFHLEPLFKCHGHPCPNIIDCFVSRPTEKTIFLLFMQSIATISLFLNILEIFHLGFKKIKRGLWGKYKLKKEHNEFHANKAKQNVAKYQSTSANSLKRLPSAPDYNLLVEKQTHTAVYPSLNSSSVFQPNPDNHSVNDEKCILDEQETVLSNEISTLSTSCSHFQHISSNNNKDTHKIFGKELNGNQLMEKRETEGKDSKRNYYSRGHRSIPGVAIDGENNMRQSPQTVFSLPANCDWKPRWLRATWGSSTEHENRGSPPKVPGSKATASSLLLILQRPTSSQPRLKETPKIKAEAKIYDSKHPPQLLQSTVSTFSGREPRSPAPMGHHSFRGPR

SEQ ID NO: 3623 - protein, 345 aa, Homo sapiens
MSENELDTTLHLKCKLGMKSILPIFRCLNSLERNIEKCRIFTRSDKCKVVIQFFYRHGIKRTHNICFQESQPLQVIFDKNVCTNTLMIQPRLLADAIVLFTSSQEEVTLAVTPLNFCLKSSNEESMDLSNAVHSEMFVGSDEFDFFQIGMDTEITFCFKELKGILTFSEATHAPISIYFDFPGKPLALSIDDMLVEANFILATLADEQSRASSPQSLCLSQKRKRSDLIEKKAGKNVTGQALECISKKAAPRRLYPKETLTNISALENCGSPAMKRVDGDVSEVSESSVSNTEEVPGSLCLRKFSCMFFGAVSSDQQEHFNHPFDSLARASDSEEDMNNGSFSIF

SEQ ID NO: 3624 - protein, 718 aa, Homo sapiens
MVGKSQQTDVIEKKKHMAIPKSSSPKATHRIGNTSGSKGSYSAKAYESIRVSSELQQTWTKRKHGQEMTSKSLQTDTIVEEKKEVKLVEETVVPEEKSADVREAAIELPESVQDVEIPPNIPSVQLKMDRSQQTSRTGYWTMMNIPPVEKVDKEQQTYFSESEIVVISRPDSSSTKSKEDALKHKSSGKIFASEHPEFQPATNSNEEIGQKNISRTSFTQETKKGPPVLLEDELREEVTVPVVQEGSAVKKVASAEIEPPSTEKFPAKIQPPLVEEATAKAEPRPAEETHVQVQPSTEETPDAEAATAVAENSVKVQPPPAEEAPLVEFPAEIQPPSAEESPSVELLAEILPPSAEESPSEEPPAEILPPPAEKSPSVELLGEIRSPSAQKAPIEVQPLPAEGALEEAPAKVEPPTVEETLAEVQPLLPEEAPREEARELQLSTAMETPAEEAPTEFQSPLPKETTAEEASAEIQLLAATEASAEEAPAEVQPPPAEEAPAEVQPPPAEEAPAEVQPPPAEEAPAEVQPPPAEEAPAEVQPPPAEEAPAEVQPPPAEEAPSEVQPPPAEEAPAEVQSLPAEETPIEETLAAVHSPPADDVPAEEASVDKHSPPADLLLTEEFPIGEASAEVSPPPSEQTPEDEALVENVSTEFQSPQVAGIPAVKLGSVVLEGEAKFEEVSKINSVLKDLSNTNDGQAPTLEIESVFHIELKQRPPEL

SEQ ID NO: 3625 - protein, 219 aa, Homo sapiens
MGVVPVSYFIRNMEESYVNLNHHGLGPRGTKAIAIALVSNMAVTKLELEDNCIMEEGVLSLVEMLQENYYLQEMNISNNHLGLEGARIISDFFERNSSSIWSLELSGNDFKEDSAALLCQALSTNYQIKKLDLSHNQFSDVGGEHLGQMLAINVGLTSLDLSWNNFHTRGAVALCNGLRGKSSDSTAAWSTWISVAMTSAMKGPPKSAKDWNPMKASEF

SEQ ID NO: 3626 - protein, 563 aa, Homo sapiens
MIKRKIWCNLCIDLVAFTSEIFKGAVFQSLDGIVVSANCKLRKIFTLKSKPQDTADKDAVYGVPFSTDEPTDIIPRSCQLMTDVPHVTQLLNMTKLRQTEIKFGGHPLRSAESDQFINRGTSITRNSKNQDVCHIAFGSKVLGPPPLSGRRNNMKISSETVRSVGSKNNRSCQPSTVEKCVNGTEMSALLIPESEEQGNKENIHQIKQTVPIHAANLHIMHPHPPQEPSADKNNNRRRLRLKSTSRERTETPSGSSSGNNRIEDKASTILTTVSQQGAELLNSGTLGPQSPDQSDEWIFPENADHISYLASSRQSLLLGDDSCNPSHLWLEASKESEHDQQAEESQSVPKDIFTFSSRPRSAPHGKTQTMSPEELSFILDLKEDNSVTSRDTQSEDDFYGGDSSEEEYDWRNYQPSQMSESELQMLASLRWQQNEELEDAGTSHGLSASQVDNCNVSISTSSDDTTTWNSCLPPPVNQGRHYQKEMNPPSPSNPRDWLNMLSPPIVPPSQQPAEQRPDSCESLSVQGEEDLSVEEDEEVLTLLYDPCLNCYFDPQTGKYYELV

SEQ ID NO: 3627 - protein, 512 aa, Homo sapiens
MNVRIDPSSLSFNMWKEIPIPFYLSVYFFDVMNPSEILKGEKPQVRERGPYVYREFRHKSNITFNNNDTVSFLEYRTFQFQPSKSHGSESDYIVMPNILVLGAAVMMENKPMTLKLIMTLAFTTLGERAFMNRTVGEIMWGYKDPLVNLINKYFPGMFPFKDKFGLFAELNNSDSGLFTVFTGVQNISRIHLVDKWNGLSKVDFWHSDQCNMINGTSGQMWPPFMTPESSLEFYSPEACRSMKLMYKESGVFEGIPTYRFVAPKTLFANGSIYPPNEGFCPCLESGIQNVSTCRFSAPLFLSHPHFLNADPVLAEAVTGLHPNQEAHSLFLDIHPVTGIPMNCSVKLQLSLYMKSVAGIGQTGKIEPVVLPLLWFAESGAMEGETLHTFYTQLVLMPKVMHYAQYVLLALGCVLLLVPVICQIRSQVGAGQRAARADSHSLACWGKGASDRTLWPTAAWSPPPAAVLRLCRSGSGHCWGLRSTLASFACRVATTLPVLEGLGPSLGGGTGGL

SEQ ID NO: 3628 - protein, 444 aa, Homo sapiens
MENSGKANKKDTHDGPPKEIKLPTSEALLDYQCQIKEDAVEQFMFQIKTLRKKNQKYHERNSRLKEEQIWHIRHLLKELSEEKAEGLPVVTREDVEEAMKEKWKFERDQEKNLRDMRMQISNAEKLFLEKLSEKEYWEEYKNVGSERHAKLITSLQNDINTVKENAEKMSEHYKITLEDTRKKIIKETLLQLDQKKEWATQNAVKLIDKGSYLEIWENDWLKKEVAIHRKEVEELKNAIHELEAENLVLIDQLSNCRLVDLKIPRYPVLHSCPTSNPRHLLLLPLESCLISARRCWRLYLTQAAGLEVPPEEMSLELPETHIEEKSELQPTEVESRDLMSSSDESTILHLSHENSIEDLQYVKIDKEENSGTEFGDTDMKYLLYEDEKDFKDYVNLGPLGVKLMSVESKKMPIHFQEKEIPVKLYKDVRSPESHITYKMMKSFL

SEQ ID NO: 3629 - protein, 115 aa, Homo sapiens
MLSNLHELLPNHLMETLYSRKSEEDKKKCENPELSGLERILARHQLPKEINLTPKPNRMPPWKRKIINNVTDGWKKCHLLKRNTKEPPMSTIVVSNTIPSILLPCYMAEKEHATH

SEQ ID NO: 3630 - protein, 116 aa, Homo sapiens
MCKHGPFTFLYLPCRIFTKILGGGAVNIAHYARQEVINVSPGYQLVRNREQISVTLGDEMFDRKKRWESEIPDKGRFSRTNIISDLEEQISELTAIIEQMNRDHQSAQKLGAQRGP

SEQ ID NO: 3631 - protein, 356 aa, Homo sapiens
MDTQGPVSQPFQQPEKPGRVRRRKTRRERNKALVGSRRPLAHHDPPVAIRDPPVVPTASKLVVITQGRLSREHRGLFNHEVKSLDVARLLSSGTLVPGSPTLPAKPSPSPGRAQEPAPRSRDKENQVPGGSGPGPPSSPELSGVGQLLAELQCQLSLPQAFPRRNLIQDARDAIVHTLQACHGCVPDLALVLRGCQPPLPGAKPGVSERKMTPFWINSPDQVPEQERQRKQQGTKEFTFPMPYTSSMPTAHRGSLAPPRGPWPPYFPSLSSPSGTAWGPPTAFDLLKSIWLVATPPPPRPWGVGLPQPLPQPSSPLLPRTSVLDWSPSPPSPLPSLSWVVAQSSPEAWSFPPMRLY

SEQ ID NO: 3632 - protein, 571 aa, Homo sapiens [sequence omitted]

SEQ ID NO: 3633 - protein, 417 aa, Homo sapiens
MPQPSVSGMDPPFGDAFRSHTFSEQTLMSTDLLANSSDPDFMYELDREMNYQQNPRDNFLSLEDCKDIENLESFTDVLDNEGALTSNWEQWDTYCEDLTKYTKLTSCDIWGTKEVDYLGLDDFSSPYQDEEVISKTPTLAQLNSEDSQSVSDSLYYPDSLFSVKQNPLPSSFPGKKITSRAAAPVCSSKTLQAEVPLSDCVQKASKPTSSTQIMVKTNMYHNEKVNFHVECKDYVKKAKVKINPVQQSRPLLSQIHTDAAKENTCYCGAVAKRQEKKGMEPLQGHATPALPFKETQELLLSPLPQEGPGSLAAGESSSLSASTSVSDSSQKKEEHNYSLFVSDNLGEQPTKCSPEEDEEDEEDVDDEDHDEGFGSEHELSENEEEEEEEEDYEDDKDDDISDTFSEPGIIMLASLPD

SEQ ID NO: 3634 - protein, 157 aa, Homo sapiens
MWRQEEELRDQEKLRKHEEKTWRQEQRLRDQEKELRKQEKQMLKQKEQMAEQEEQMQKQEEQVRKQEEQVRKQEEQMWKQEEQMRKQEEQMRKQEKQMGEQEEQMRKREEQMRKREEQITQLPPGMKNTQEHPGLGSTSCILFFYRGDKKKIKIINI

SEQ ID NO: 3635 - protein, 169 aa, Homo sapiens [sequence omitted]

SEQ ID NO: 3636 - protein, 132 aa, Homo sapiens
MIHLKGSSSGESQYLPQHCRMGRSLPPTHSTHLTPPFQGKDLRAAGESEIGRHGANWATARDLEPTPLNSEHRKRRQARRGQEADTRAGQRNGGEHTHALRSKAERCEFTKTGVHRPITDTDPGWPGAPHTG

SEQ ID NO: 3637 - protein, 136 aa, Homo sapiens
MECNGLILAHCNLCLPGSGDSPASASQVAGTTGTHHCTQLIFVFLVETEFHHVGQAGLELLTSSDLPASASQNAGITGVSHWAWTLFFYFLNKLTFALQTHPEFFFFFFFETGSHCVAQVEWHYLGSLQPPPPRFK

SEQ ID NO: 3638 - protein, 114 aa, Homo sapiens
MMGIFNGKAVTQPKRGTISEASRQKSLDRRSNEPGREHRAGAHVENLLRNLLEAEKTLGKSSSHGSGIPWIVRPAFVFSLSLFLAVPPGSHSCSRNQARSGCIFWRLNNKKQTN

SEQ ID NO: 3639 - protein, 164 aa, Homo sapiens [sequence omitted]

SEQ ID NO: 3640 - protein, 459 aa, Homo sapiens
MAGTRWVLGALLRGCGCNCSSCRRTGAACLPFYSAAAAASQTRGLQTGPVPPGRLAGPPAVATSAAAAAAASYPALRASLLPQSLAAAAAVPTRSYSQESKTTYLEDLPPPPEYELAPSKLEEEVDDVFLIRAQGLPWSCTMEDVLNFFSDCRIRNGENGIHFLLNRDGKRRGDALIEMESEQDVQKALEKHRMYMGQRYVEVYEINNEDVDALMKSLQVKSSPVVNDGVVRLRGLPYSCNEKDIVDFFAGLNIVDITFVMDYRGRRKTGEAYVQFEEPEMANQALLKHREEIGNRYIEIFPSRRNEVRTHVGSYKGKKIASFPTAKYITEPEMVFEEHEVNEDIQPMTAFESEKEIELPKEVPEKLPEAADFGTTSSLHFVHMRGLPFQANAQDIINFFAPLKPVRITMEYSSSGKATGEADVHFETHEDAVAAMLKDRSHVHHRYIELFLNSCPKGK

SEQ ID NO: 3641 - protein, 572 aa, Homo sapiens
MPVYCKYQFHKTPVHKTKGEPHGTHVYFQDINVIFLGALHPSDLREYLEGPPMVVEVHDRDRKSEECSQKPVLFGEDPLDSYLNFQALISPRETENNPFESQNKMWYPYGIAQVSFADLLLGHKYLNLAVPIHSCEVQPTHCGQDSRRRKVVGLGVPRDGHQHGPMPRGNYLEADSQLKLRVDIAVPLRAGARAADPDLGGSQFGRIIFVFDFKKVSLLHSLLQDITMINAKALGLDSYPVRTLQQILSAFKVRVRVQEQQHLDVLTGFHLLDGKTHLFILEGLADQGLRQLWENHQSWIPRSEHRKYKVLYNSQLLFRSRLYGDLEAILYHVHLFQPTELLLQQAVFFLRDTERRRVFQALARIHDICYNSTTLWDVTVRDLLPSSAMIKDLSQEFGMPLSQEELTDEKLFALPPQPAPNLEDYHSRNSTLTLEIHAHQEPRKRFTYSQDYLSAMVEPLDLKEEEKKAQKKSRQAWLTARGFQVTGLQSDTESSFQDLKLPPIKELNEEWKENSLFANVLEPVLDRDRWSWDRHHVDFDLYKKPPPFLELLPSPAPKPVTVRKKKGNSPIS

SEQ ID NO: 3642 - protein, 673 aa, Homo sapiens [sequence omitted]

SEQ ID NO: 3643 - protein, 152 aa, Homo sapiens [sequence omitted]

SEQ ID NO: 3644 - protein, 166 aa, Homo sapiens [sequence omitted]

SEQ ID NO: 3645 - protein, 293 aa, Homo sapiens
MNVMNVGRPLGLVHSLFSIREFILKKDTMNAMSVAKPSSIAQALLDTRKFILEKNHICVMNVGRASGRVLSLSGIREFIQGTNPMNVMNVGKLLARTQRLLDILEFILVRSPMYVRNVGRPSGGTQNFLDMREFTLERNPMNALSVERLSGGPLTLLSTREFILERNPINVMSVQEPFGIILSCFSTRKFILERNLMNVASVRKHLASIPNLSYIREFTLERSLMSAKNVRRLLVGALTSSDIKVFTVWSNLQNRKAFSGKAKVQLIHLFIICKYAPQVFKSNEWTEPPLSSH

SEQ ID NO: 3646 - protein, 139 aa, Homo sapiens
MNREHSASIPVPLVALQSAGTRRNQKPPGRAFCLYGVKAVSSNLCFLKQRNNLDETNFPQRKGRAHSELVKKMPGAGSILKWKRWCLAMLPKLVLNSWHQVILLPQPPKVLGLQNKTISRRVCGILRTDTGRNKGYRSE

SEQ ID NO: 3647 - protein, 588 aa, Homo sapiens
MANLCTPSSTANSCSSSASNTPGAPETHPSSSPTPTSSNTQEEAQPSSVSDLSPMSMPFASNSEPAPLTLTSPRMVAADNQDTSNLPQLAVPAPRVSHRMQPRGSFYSMVPNATIHQDPQSIFVTNPVTLTPPQGPPAAVQLSSAVNIMNGSQMHINPANKSLPPTFGPATLFNHFSSLFDSSQVPANQGWGDGPLSSRVATDASFTVQSAFLGNSVLGHLENMHPDNSKAPGFRPPSQRVSTSPVGLPSIDPSGSSPSSSSAPLASFSGIPGTRVFLQGPAPVGTPSFNRQHFSPHPWTSASNSCDSPIPSVSSGSSSPLSATSAPPTLGQPKGVSASQDRKIPPPIGTERLARIRQGGSVAQAPAGTSFVAPVGHSGIWSFGVNAVSEGLSGWSQSVMGNHPMHQQLSDPSTFSQHQPMERDDSGMVAPSNIFHQPMGLPISMYGGTIIPSHPQLADVPGGPLFNGLHNPDPAWNPMIKVIQNSTECTDAQQASLLPSVPALKGEIPSPQLTRPKKRIGRPMVASPNQRHQDHLRPKVPAGVQELTHCPDTPLLPPSDSRGHNSSNSPSLQAGGAEGAGDRGRDTR

SEQ ID NO: 3648 - protein, 121 aa, Homo sapiens
MFLSLKMFCWGRHAMVLRIAPFSDDLLLTSDTYRDSAGACQSSNTSRNVRIWDRRSQDIHLALFWEEEIHFLACAGWLTPVIPGRWDYGCEPPHPACFTSFNSVTVDDVPHRPASHATCES

SEQ ID NO: 3649 - protein, 269 aa, Homo sapiens
MVAEEGSRCLYPGQLFLLLHFPVVGQCWHCERCEGYNYQVDELSCELCPLDQRPNMNRTGCQLIPIIKLEWHSPWAVVPVFVAILGIIATTFVIVTFVRYNDTPIVRASGRELSYVLLTGIFLCYSITFLMIAAPDTIICSFRRVFLGLGMCFSYAALLTKTNRIHRIFEQGKKSVTAPKFISPASQLVITFSLISVQLLGVFVWFVVDPPHIIIDYGEQRTLDPEKARGVLKCDISDLSLICSLGYSILLMVTCTVYAIKTRGVPETF

SEQ ID NO: 3650 - protein, 540 aa, Homo sapiens
MRALDDMDHEGRDTLAREELRQGLSELPAIHDLHQGILEELEERLSNWESQQKVADVFLAREQGFDHHATHILQFDRYLGLLSENCLHSPRLAAAVREFEQSVQGGSQTAKHRLLRVVQRLFQYQVLLTDYLNNLCPDSAEYDNTQGALSLISKVTDRANDSMEQGENLQKLVHIEHSVRGQGDLLQPGREFLKEGTLMKVTGKNRRPRHLFLMNDVLLYTYPQKDGKYRLKNTLAVANMKVSRPVMEKVPYALKIETSESCLMLSASSCAERDEWYGCLSRALPEDYKAQALAAFHHSVEIRERLGVSLGERPPTLVPVTHVMMCMNCGCDFSLTLRRHHCHACGKIVCRNCSRNKYPLKYLKDRMAKVCDGCFGELKKRGRAVPGLMRERPVSMSFPLSSPRFSGSAFSSVFQSINPSTFKKQKKVPSALTEVAASGEGSAISGYLSRCKRGKRHWKKLWFVIKGKVLYTYMASEDKVALESMPLLGFTIAPEKEEGSSEVGPIFHLYHKKTLFYSFKAEDTNSAQRWIEAMEDASVL

SEQ ID NO: 3651 - protein, 244 aa, Homo sapiens
MPRGFHNNNIKAIPEKAFMGNPLLQTIHFYDNPIQFVGRSAFQYLPKLHTLSLNGAMDIQEFPDLKGTTSLEILTLTRAGIRLLPSGMCQQLPRLRVLELSHNQIEELPSLHRCQKLEEIGLQHNRIWEIGADTFSQLSSCDSTQALVAFSDVDLILEASEAGRPPGLETYGFPSVTLISCQQPGAPRLEGSHCVEPEGNHFGNPQPSMDGELLLRAEGSTPAGGGLSGGGGFQPSGLAFASHV

SEQ ID NO: 3652 - protein, 477 aa, Homo sapiens
MAHNPNMTHLKINLPVTALPPLWVRCDSSDPEGTCWLGAELITTNNSITGIVLYVVSCKADKNYSVNLENLKNLHKKRHHLSTVTSKGFAQYELFKSSALDDTITASQTAIALDISWSPVDEILQIPPLSSTATLNIKVESGEPRGPLNHLYRELKFLLVLADGLRTGVTEWLEPLEAKSAVELVQEFLNDLNKLDGFGDSTKKDTEVETLKHDTAAVDRSVKRLFKVRSDLDFAEQLWCKMSSSVISYQDLVKCFTLIIQSLQRGDIQPWLHSGSNSLLSKLIHQSYHGTMDTVSLSGTIPVQMLLEIGLDKLKKDYISFFIGQELASLNHLEYFIAPSVDIQEQVYRVQKLHHILEILVSCMPFIKSQHELLFSLTQICIKYYKQNPLDEQHIFQLPVRPTAVKNLYQSEKPQKWRVEIYSGQKKIKTVWQLSDSSPIDHLNFHKPDFSELTLNGSLEERIFFTNMVTCSQVHFK

SEQ ID NO: 3653 - protein, 486 aa, Homo sapiens [sequence omitted]

SEQ ID NO: 3654 - protein, 176 aa, Homo sapiens
MGNHELMTSWLLDVRKNLQSQRELSKFCPEQTEGWRCHRLRWENGRCHRLQGKVGDQLRAPEPSWKEFPIQPASVSASVLFLMTLRVLASGSFMMQRVPPSHPGRLRAPASSWQPGARLRIWRPTTGWSLAATSQRRVSSPVVSCGRVAVTRSRTRDSWPWCPSRSPRCVACRLFF

SEQ ID NO: 3655 - protein, 470 aa, Homo sapiens
MRGHKGAKGEIGEPGRQGHKGEEGDQGELGEVGAQGPPGAQGLRGITGIVGDKGEKGARGLDGEPGPQGLPGAPGDQGQRGPPGEAGPKGDRGAEGARGIPGLPGPKGDTGLPGVDGRDGIPGMPGTKGEPGKPGPPGDAGLQGLPGVPGIPGAKGVAGEKGSTGAPGKPGQMGNSGKPGQQGPPGEVGPRGPQGLPGSRGELGPVGSPGLPGKLGVVGEPGPKGEQGASGEEGEAGERGELGDIGLPGPKGSAGNPGEPGLRGPEGSRGLPGVEGPRGPPGPRGVQGEQGATGLPGVQGPPGRAPTDQHIKQVCMRVIQEHFAEMAASLKRPDSGATGLPGRPGPPGPPGPPGENGFPGQMGIRGLPGIKGPPGALGLRGPKGDLGEKGERGPPGRGPNGLPGAIGLPGDPGPASYGRNGRDGERGPPGVAGIPGVPGPPGPPGLPGFCEPASCTMQAGQRAFNKGPDP

SEQ ID NO: 3656 - protein, 136 aa, Homo sapiens
MHEPLCPASCCFYTFSIAITVFDGSFCFFEFLIFITPASSATLKDLESSSRCEAVLKRQLWQSIKARAQLEAHVTQMLEQVQLETDEYTQHLKGERARWQQRVWKMSEEVCTWKEEKKHDRHRVQELERSLAELKN

SEQ ID NO: 3657 - protein, 122 aa, Homo sapiens [sequence omitted]

SEQ ID NO: 3658 - protein, 135 aa, Homo sapiens
MKPHAEQIQLLGKQGAAVSQLCPLVLVSGHICREERRHFQRIALTASSLSCGSQLKWHLLQEAFPDFLPFSVLPVSWTARATDVLALSVDMACSLLPHWTGHSARAKTVFGPSLWLQLCLAQVQAQYGCSLMFAE

SEQ ID NO: 3659 - protein, 104 aa, Homo sapiens
MSHRAWLILAFFFIFYYFFKIESCSVAQAGVQWHSLSSVQPPPPRFKQFSCLSLPSSWDNRHMPPRLRLIVGGRACIIVPLHSSLGNRARLCLPNKAEKDYLRE

SEQ ID NO: 3660 - protein, 108 aa, Homo sapiens
MSKKHQNDCTCDRSCKNNATKGFPTTSRMQTRKFGPKALLFLYVRMPNSLAGKRPIMQIKYTSNFSPEKQLWLQVLLKQALQQRCYSLALRRNKNSPSEVYERVRNCE

SEQ ID NO: 3661 - protein, 180 aa, Homo sapiens
MSPLPSTLPQGTSCPALPLLLPGRPCAAALFVRHPFPGVPLSFPLTLLIALLSSPLYSSPHSLSSHPQPDLTACKSHPGEMVSLLLGQFPGGPELPGLVDSQQRPGRHGESKTMASEHSAWPAPFLSCLGSQTAQASAFELASPWNLVCNHGANCRTRGREGRGVKSIESVLKEGGDWTT

SEQ ID NO: 3662 - protein, 198 aa, Homo sapiens
MRAPAQVRTLRWSLGWPGSRGRDVFAALRCAQALRCQPLGSALPPQAPTRDLGRPQAFDSSRTPGPRPPRSTLRMMETKSPTSPSYGARGKVPPGAGPGSPLSRGAGQGAPLSETRFHHVAQAFLKLLSSSNPPTSASESARIIGVSHCTQPQVASLSDRHCSKVNHTVLSPRKGVPLQLTAAHSSSQEVLATVPFHG

SEQ ID NO: 3663 - protein, 461 aa, Homo sapiens
MKEPLLGGECDKAVASQLGLLDEIKTEPDNAQEYCHRQQSRTQENELKINAVFSESASQLTAGIQLSLASSGVNKMLPSVSTTAIQVSCAGCKKILQKGQTAYQRKGSAQLFCSIPCITEYISSASSPVPSKRTCSNCSKDILNPKDVISVQLEDTTSCKTFCSLSCLSSYEEKRKPFVTICTNSILTKCSMCQKTAIIQYEVKYQNVKHNLCSNACLSKFHSANNFIMNCCENCGTYCYTSSSLSHILQMEGQSHYFNSSKSITAYKQKPAKPLISVPCKPLKPSDEMIETTSDLGKTELFCSINCFSAYSKAKMESSSVSVVSVVHDTSTELLSPKKDTTPVISNIVSLADTDVALPIMNTDVLQDTVSSVTATADVIVDLSKSSPSEPSNAVASSSTEQPSVSPSSSVFSQHAIGSSTEVQKDNMKSMKISDELCHPKCTSKVQKVKGKSRSIKKSCC

SEQ ID NO: 3664 - protein, 110 aa, Homo sapiens
MFTWPISRPRVPLTRGFFFFLFLFFFFLQGGIMGLWFFSPPTGRGSVYVACGNRIGGNELRFPRVGKREVKSGATPPVLWRNSPNTEKKGAVGVLLCLQVRVVSATGARH

SEQ ID NO: 3665 - protein, 259 aa, Homo sapiens
MASPQGGQIAIAMRLRNQLQSVYKMDPLRNEEEVRVKIKDLNEHIVCCLCAGYFVDATTITECLHTFCKSCIVKYLQTSKYCPMCNIKIHETQPLLNLKLDRVMQDIVYKLVPGLQDSEEKRIREFYQSRGLDRVTQPTGEEPALSNLGLPFSSFDHSKAHYYRYDEQLNLCLERLSSGKDKNKSVLQNKYVRCSVRAEVRHLRRVLCHRLMLNPQHVQLLFDNEVLPDHMTMKQIWLSRWFGKPSPLLLQYSVKEKRR

SEQ ID NO: 3666 - protein, 122 aa, Homo sapiens
MKRTLETMRNTMGEETGELWSHKPGFRSQFCHSPTEWPRTAFFREQEGAASLSIAWDHIQTGDVARSKSTSVGILVDPGDPLLLRELLRGLGYDSRTKSFGRDFPSLDKEKEVELPAAALGG

SEQ ID NO: 3667 - protein, 247 aa, Homo sapiens
MLCVYFFKGIEDNDELPSAKGRKVLRSLVVCENGLPIKEGLSCNGPRPVGLRSTLQGRGEMVEQLRELTRLLEAKDFRSRMEGVGQLLELCKAKTELVTAHLVQVFDAFTPRLQDSNKKVNQWALESFAKMIPLLRESLHPMLLSIIITVADNLNSKNSGIYAAAVAVLDAMVESLDNLCLLPALAGRVRFLSGRAVLDVTDRLAGEHPQPHPTPSPGRFLFSPGLWLNHSPSYLRPEIIPPNHLKF

SEQ ID NO: 3668 - protein, 168 aa, Homo sapiens
MRRDRGPKPALGGAGEVEPGGMAASPTGRPRRLQRYLQSGEFDQFRDFPIFESNFVQVTRLGEVANEVTMGVAASSPALELPDLLLLAGPAKENGHLQLFGLFPLKFVQLFVHDKSRCQLEVKLNTSRTFYLQLRAPLKTRDREFGQWVRLLYRLRFLSASAVPFTQE

SEQ ID NO: 3669 - protein, 185 aa, Homo sapiens [sequence omitted]

SEQ ID NO: 3670 - protein, 138 aa, Homo sapiens
MNEWQSWGLNLDLFDSILLRTQLHELCLIKIFGAFFFFATKSHSVTQAGGAVLAHCNLRLPGSSNSPASASRVAGITGTHHHAWLIFVFLVEAGFHHVGEASLELLTSSDPPASASQSAGITGLSHHTWPFSVILTNT

SEQ ID NO: 3671 - protein, 186 aa, Homo sapiens [sequence omitted]

SEQ ID NO: 3672 - protein, 122 aa, Homo sapiens
MKVALLRFFSPPNMSVTHKEAHERKCPEKPELWKAGSTVPLTAPEKTDPFPLCPPLSLTCPQQQSCIPSSSQDVLNSLWVSSHCLQLKISKTKTHCLPTQNVLPFLLPTPVSIVCRLPGLDP

SEQ ID NO: 3673 - protein, 122 aa, Homo sapiens
MPVIAAVGHVVLWWMPVIATVGCVVLWWMLVIAAVGRVVLWWMPVIAAVGCVVLWWMLVIATVGRVVLWWMPVIAAVGHVVLWWVLIQFRTHVALGCLGPQHTGKLIITGVACSLSTAHPQL

SEQ ID NO: 3674 - protein, 108 aa, Homo sapiens [sequence omitted]

SEQ ID NO: 3675 - protein, 120 aa, Homo sapiens
MAGAARWVGQESSAMVCFGCPGGASSRCRSPRGRQASRVPRLENGAQRVVRTMVHLVLQPKRVTLVHPPRGLEPVCTPIARMRPKSHGLRSSLPLAMIPQPATRVSRPQALWKRLYVACT

SEQ ID NO: 3676 - protein, 121 aa, Homo sapiens [sequence omitted]

SEQ ID NO: 3677 - protein, 290 aa, Homo sapiens [sequence omitted]

SEQ ID NO: 3678 - protein, 117 aa, Homo sapiens
MVGPSHLGNSSLMQSVTQQWCLGASACIGAGLVPKPRPPPCGSTTGKGNNQTSSSVVMRIQEDHVNIGIHNGQTLWRMPVIPAIWEAEVGRWREPQNLKPAWATWQNQSLLKIQKIG

SEQ ID NO: 3679 - protein, 342 aa, Homo sapiens
MLPLEPCRRPNFELIPLLNSVDSDNCGSMVPSFADILYVANDEEASYLRFRNSIWKNEEEKVEIFHPLRLVRDPLSPAVRQKETVKNDLPVNEAAIRKIAALENELTFLRSQIAAIVEMQELKNSTNSSSFGLSDERISLGQLSSSRAAHLSVDPDQLPGSVLSPPPPPPLPPQFSSLQPPCFPPVQPGSNNICDSDNPATEMSKQNPAANKTNYSHHSKSQRNKDIPNMLDVLKDMNKVKLRAIERSPGGRPIHKRKRQNSHWDPVSLISHALKQKFAFQEDDSFEKENRSWESSPFSSPETSRFGHHISQSEGQRTKEEMVNTKAVDQGISNTSLLNSRI

SEQ ID NO: 3680 - protein, 247 aa, Homo sapiens
MGQGLPDEEQEKLLRICSIYTQSGENSLVQEGSEASPIGKSPYTLDSLYWSVKPASSSFGSEAKAQQQEEQGSVNDVKEEEKEEKEVLPDQVEEEEENDDQEEEEEDEDDEDDEEEDRMEVGPFSTGQESPTAENARLLAQKRGALQGSAWQVSSEDVRWDTFPLGRMPGQTEDPAELMLENYDTMYLLDQPVLEQRLEPSTCKTDTLGLSCGVGSGNCSNSSSSNFEGLLWSQGQLHGLKTGLQLF

SEQ ID NO: 3681 - protein, 413 aa, Homo sapiens
MGSSQSVEIPGGGTEGYHVLRVQENSPGHRAGLEPFFDFIVSINGSRLNKDNDTLKDLLKANVEKPVKMLIYSSKTLELRETSVTPSNLWGGQGLLGVSIRFCSFDGANENVWHVLEVESNSPAALAGLRPHSDYIIGADTVMNESEDLFSLIETHEAKPLKLYVYNTDTDNCREVIITPNSAWGGEGSLGCGIGYGYLHRIPTRPFEEGKKISLPGQMAGTPITPLKDGFTEVQLSSVNPPSLSPPGTTGIEQSLTGLSISSTPPAVSSVLSTGVPTVPLLPPQVNQSLTSVPPMNPATTLPGLMPLPAGLPNLPNLNLNLPAPHIMPGVGLPELVNPGLPPLPSMPPRNLPGIAPLPLPSEFLPSFPLVPESSSAASSGELLSSLPPTSNAPSDPATTTAKADAASSSLWM

SEQ ID NO: 3682 - protein, 425 aa, Homo sapiens
MRSLDFGMRTQVTREAISRLCEAVPGANGAIKKRKPPVKFLSTVLGKSNLQFSGMNIKLTISTCSLTLMNLDNQQIIANHHMQSISFASGGDPDTTDYVAYVAKDPVNQRACHILECHNGMAQDVISTIGQAFELRFKQYLKNPSLNTSCESEEVHIDSHAEEREDHEYYNEIPGKQPPVGGVSDMRIKVQATEQMAYCPIQCEKLCYLPGNSKCSSVYENCLEQSRAIGNVHPRGVQSQRDTSLLKHTCRVDLFDDPCYINTQALQSTPGSAGNQRSAQPLGSPWHCGKAPETVQPGATAQPASSHSLPHIKQQLWSEECYHGKLSRKAAESLLVKDGDFLVRESATSPGQYVLSGLQGGQAKHLLLVDPEGKVRTKDHVFDNVGHLIRYHMDNSLPIISSGSEVSLKQPVRKDNNPALLHSNK

SEQ ID NO: 3683 - protein, 139 aa, Homo sapiens
MDGLKVGHDPAKEFTNHWWNELFNKTAANLVVETGQDGVQIRSLSKETTRYNHPKPNLLYQKFVKVLEAVGNRVHPFSLPWFPWGLNSCLVCLINSQNFPNIVGSCDQPCCCLLRLPRPSAGIEIFRFRGSCHLLREQQ

SEQ ID NO: 3684 - protein, 263 aa, Homo sapiens
MAKRLQAELSCPVCLDFFSCSISLSCTHVFCFDCIQRYILENHDFRAMCPLCRDVVKVPALEEWQVSVLTLMTKQHNSRLEQSLHVREELRHFREDVTLDAATASSLLVFSNDLRSAQCKKIHHDLTKDPRLACVLGTPCFSSGQHYWEVEVGEVKSWSLGVCKEPADRKSNDLFPGHGFWISMKAGAIHANTHLERIPASPRLRRVGIFLDADLEEIQFFDVDNNVLIYTHDGFFSLELLCPFFCLELLGEGESGNVLTICP

SEQ ID NO: 3685 - protein, 194 aa, Homo sapiens
MDWGGGSTLTPAGASAQEPRLAQPSLGRPIPRVPHPVSVSTDQGLPDTCSGVAMGTSGRVSVAHTAVCRHTEGMHACVCAHLHVFTRTGHRRRCSHSGVHRPLCRCAHTQQGYVHRRVCVLAPGGGSRPTPHIVYSVPAARTCLGAPGSLSPCHLCVHICAHTYSGTPVCVHGCPGTLGSPSPRLPRLLESGTF

SEQ ID NO: 3686 - protein, 168 aa, Homo sapiens [sequence omitted]

SEQ ID NO: 3687 - protein, 188 aa, Homo sapiens
MLVMEDQHNSEIESLQKALGVAREDNRKLAMSLEQALQTNNHLQTKLDHIQEQLESKELERQNLETFKDRMTEESKVEAELHAERIEALRKQFQTERETTKKVAQREVAELKKALDEANFRSVEVSRTNRELRQKLAELEKILESNKEKIKNQKTQIKLHLSAKANNAQNIERMKVVWETSSHFLDTL

SEQ ID NO: 3688 - protein, 125 aa, Homo sapiens
MTCWEGNCHVCSSPGGSDVFLIILQVPKAHPCLWGHITSHVTLCSFGTMSLWTVWLIVVVQGQVMCHPSLKCLHPVNCLAYFPLTPGSGPSSLLSPYLSPHIQSPPKILPVLLLCPFERAQSFIL

SEQ ID NO: 3689 - protein, 343 aa, Homo sapiens
MHHTRESKDGEPSPRSAAHTMPRRKKGYCECCQEAFEELHVHLQSAQHRSFALEAHLYAEVDRIIAQLSHSFADIPFQAGLPRWSGSPASDCDPLCPETLHPHQPSHPRAASPRIRKEDSCQASVTQGRAAGQQRWTESLDGVMGPPASHTCVSATTLLPALPKGSREQGCLCPCPASFTQSHLVTSLALLPGEWSPAEDMPLHPSQENSFAPADIPVKGPLLFPEARPWLMSARCWVRPFPFVTWGCLIPHDTTPLHEEVSPCPCLRLGYLYLLLTQSLWCRVRVPSLSTAGPIPRTSHPCTLAFPSYLNDHDLGHLCQAKPQGWNTPQPFLHCGFLAVDSG

SEQ ID NO: 3690 - protein, 333 aa, Homo sapiens
MCRGGRMFAPTKTWRRWHRRVNTTQKRYAICSALAASALPALVMSKGHRIEEVPELPLVVEDKVEGYKKTKEAVLLLKKLKAWNDIKKVYASQRMRAGKGKMRNRRRIQRRGPCIIYNEDNGIIKAFRNIPGITLLNVSKLNILKLAPGGHVGRFCIWTESAFRKLDELYGTWRKAASLKSNYNLPMHKMINTDLSRILKSPEIQRALRAPRKKIHRRVLKKNPLKNLRIMLKLNPYAKTMRRNTILRQARNHKLRVDKAAAAAAALQAKSDEKAAVAGKKPVVGKKGKKAAVGVKKQKKPLVGKKAAATKKPAPEKKPAEKKPTTEEKKPAA

SEQ ID NO: 3691 - protein, 364 aa, Homo sapiens [sequence omitted]

SEQ ID NO: 3692 - protein, 341 aa, Homo sapiens
MWKGFILTVVELRVPTDLTLLPGHLYMMSEVLAKEEARRALETPSCFLKVSRLEAQLLLERYPECGNLLLRPSGDGADGVSVTTRQMHNGTHVVRHYKVKREGPKYVIDVEQPFSCTSLDAVVNYFVSHTKKALVPFLLDEDYEKVLGYVEADKENGENVWVAPSAPGPGPAPCTGGPKPLSPASSQDKLPPLPPLPNQEENYVTPIGDGPAVDYENQDVASSSWPVILKPKKLPKPPAKLPKPPVGPKPEKGFHHVAQAGLELLTSSDPPTSASQSAGITGVSHHTWPHLSSLPEPKVFNGGLGRKLPVSSAQPLFPTAGLADMTAELQKKLEKRRALEH

SEQ ID NO: 3693 - protein, 186 aa, Homo sapiens [sequence omitted]

SEQ ID NO: 3694 - protein, 118 aa, Homo sapiens
MKTHSLTITRTASRGGANPFVRSCPHDPITSHHALPPTLGIIIEHEMWMGTQIQTISKCVVFFFLGLFAFLDRVVSFCFFRLECIGAIVAQLQPPTPGLKQSSGLRLYFLCDWQDMYL

SEQ ID NO: 3695 - protein, 162 aa, Homo sapiens
MAVGILTQTVGPWPRLVAYLSKQLDGVFKDWPPCLRALAATALLAQEVDKLTLGQNLNIKASHAVVTLMNTKGHHWLMNARLTRYQNLLCEKPCITIEVCNTLNPATLLPVPESPVEQNCVEVLDTVYSSRLDLQDHTWASVDWELYVDRSSFVNPQGERCA

SEQ ID NO: 3696 - protein, 140 aa, Homo sapiens
MQQDPELPSVTRFCLPLCARCYVQPQWVFDSVNARLLLPVAEYFSGVQLPPHLSPFVTEKEGDYVPPEKLKLLALQRGEDPGERDGTGLALTPGPTLAVSLSCQGGKLQGTGSRSRKPFEVTCRIRLRRRDIYLLGSGVI

SEQ ID NO: 3697 - protein, 128 aa, Homo sapiens [sequence omitted]

SEQ ID NO: 3698 - protein, 201 aa, Homo sapiens
MGNVMEGKSVEELSSTECHQWYKKFMTECPSGQLTLYEFRQFFGLKNLSPSASQYVEQMFETFDFNKDGYIDFMEYVAALSLVLKGKVEQKLRWYFKLYDVDGNGCIDRDELLTIIQAIRAINPCSDTTMTAEEFTDTVFSKIDVNGDGELSLEEFIEGVQKDQMLLDTLTRSLDLTRIVRRLQNGEQDEEGADEAAEAAG

SEQ ID NO: 3699 - protein, 1394 aa, Homo sapiens [sequence omitted]

SEQ ID NO: 3700 - protein, 179 aa, Homo sapiens
MIVYLENLIISAPKLLKLISKFDKVSGYKINMQKSQAFLYINNRQSESQIMSELPFTIATKRIKYLGIQLTRDVKDLFEENYEPLLKEIRERTQTKNIPLSWIGIINIVKMATLPKVIYRINAIPIELPLTFFTELEKNDFKFHMEPKNSSYSQDNPKQKRAKLEASCYLTSNCTTVLQ

SEQ ID NO: 3701 - protein, 731 aa, Homo sapiens [sequence omitted]

SEQ ID NO: 3702 - protein, 341 aa, Homo sapiens
MLNTSVPNDMDEQQNARESLEDQNLKDQDHLYEEEIGAVGGIDYNDTNQNAQSEQNGSSDLLCDLNTSSYDTSALCNGFPLENICTQVIDQNQNLHGDSKQSNLTNGDYVASSDGTSKPSSSLAVAAQLREIIPSSALPNGTVQHILMPDDEGEGELCWKKVDLGDVKNVDVLSFSHAPSFNFLSNSCWSKPKEDKAVDTSDLEVAEDPMGLQGIDLITAALLFCLGDSPGGRGISDSRMADIYHIDVGTQTFSLPSAILATSTMVGEIASASACDHANPQLSNPSPFQTLGLDLVLECVARYQPKQRSMFTFVCGQLFRRKEFSSHFKNVHGDIHAGLNG

SEQ ID NO: 3703 - protein, 230 aa, Homo sapiens [sequence omitted]

SEQ ID NO: 3704 - protein, 146 aa, Homo sapiens
MVQGMCSPSPFGTSRACTVGTQVDSRSLPWALGASAQRGNIPTATCARTAGTLRRGLQPGWGWEDFLDEGQPGFSSRMSWSRPPAQEQGAGRGPSWVRGLGQPTAAFEQGPRSSVSPQWEGGGQGPGELGRKHLLGPSQHHPTDRH

SEQ ID NO: 3705 - protein, 178 aa, Homo sapiens
MHSMDPQLERQMETTQNLVDSYMAIVNKTVWNLMVGAKPKTIMHIMIYNVHAPPHGDQGVHLLGAAVQPALAWEREDTHGGVGRAGTAARRDAASQSCCPTCTRVGTRRHSWRSRQSRHSGATRLAWEEIDTPGGVGRAGTAARRDSRGNEKTLLEASAEQADQGVHLLGAAVQPALA

SEQ ID NO: 3706 - protein, 736 aa, Homo sapiens [sequence omitted]

SEQ ID NO: 3707 - protein, 203 aa, Homo sapiens
MPLLAFPGPAPACWRPLDVQPLPQQWALHAHLLPGRGLFGPGSRLGAAPAGPAPASRPSGGQAHASGQPLPAWRLLLCMGSRPWTSSSRPLQAQLFLPAASAGPDCRQVGLSRDSSFLPAASVGPDCHQVGLSKDSSCLPVASVGPSRPQVCLPRPSSGLSAASPGAKVPRVRLSRLSSSCLPVASFSPAQLMPPGGLPRPCF

SEQ ID NO: 3708 - protein, 177 aa, Homo sapiens
MGLQFSQVISICWAAMGSLYAEMTENKYVCFSALTILSEWQEWEGARGSGELWNPEMWQGVAREGYWGSWGALSPAQCSTEPCSSTACPWSFWPSSTGRSTTEAWGVGTGLRRGKQKAASGVLIKLLFISTCQLLHGARGRRLETREESRSRQMLDPRGLQAWPAATLVDLALGLGS

SEQ ID NO: 3709 - protein, 509 aa, Homo sapiens
MELKKSPDGGWGWVIVFVSFLTQFLCYGSPLAVGVLYIEWLDAFGEGKGKTAWVGSLASGVGLLASPVCSLCVSSFGARPVTIFSGFMVAGGLMLSSFAPNIYFLFFSYGIVVGLGCGLLYTATVTITCQYFDDRRGLALGLISTGSSVGLFIYAALQRMLVEFYGLDGCLLIVGALALNILACGSLMRPLQSSDCPLPKKIAPEDLPDKYSIYNEKGKNLEENINILDKSYSSEEKCRITLANGDWKQDSLLHKNPTVTHTKEPETYKKKVAEQTYFCKQLAKRKWQLYKNYCGETVALFKNKVFSALFIAILLFDIGGFPPSLLMEDVARSSNVKEEEFIMPLISIIGIMTAVGKLLLGILADFKWINTLYLYVATLIIMGLALCAIPFAKSYVTLALLSGILGFLTGNWSIFPYVTTKTVGIEKLAHAYGILMFFAGLGNSLGPPIVGWFYDWTQTYDIAFYFSGFCVLLGGFILLLAALPSWDTCNKQLPKPAPTTFLYKVASNV

SEQ ID NO: 3710 - protein, 672 aa, Homo sapiens
MVVSAGPWSSEKAEMNILEINEKLRPQLAENKQQFRNLKEKCFVTQLAGFLANRQKKYKYEECKDLIKSMLRNERQFKEEMLAEQLKQAEELRQYKVLVHSQERELTQLREKLREGRDASRSLNQHLQALLTPDEPEKSQGQDLQEQLAEGCRLAQHLVQKLSPENDNDDDEDVQVEVAEKVQKSSAPREMQKAEEKEVPEDSLEECAITCSNSHGPYDSNQPHRKTKITFEEDKVDSTLIGSSPHVEWEDAVHIIPENESDDEEEEEKGPVSPRNLQESEEEEVPQESWDEGYSTLSIPPEMLASYKSYSSTFHSLEEQQVCMAVDIGRYRWDQVKKEDQEATGPRLSRELLDEKEPEVLQDSLDRCYSTPSGCLELTDSCQPYRSAFYVLEQQRVGLAVDMDEIEKYQEVEEDQDPSCPRLSRELLDEKEPEVLQDSLDRCHSTPSGYLELPDLGQPYSSAVYSLEEQYLGLALDMDRIKKDQEEEEDQGPPCPRLSRELLEVVEPEVLQDSLDRCYSTPSSCLEQPDSCQPYGSSFYALEEKHVGFSLDVGEIEKKGKGKKRRGRRSKKKRRRRGRKEGEEDQNPPCPRLNGVLMEVEEPEVLQDSLDRCYSTPLMYFELPDSFQHYRSVFYSFEEQHISFALYVDNRFFTLTVTSLHLVFQMGVIFPQ

SEQ ID NO: 3711 - protein, 222 aa, Homo sapiens
MLNSLMKRDLEKHLNVSKKFHQVSILLGIELLYQVNFSREALQERRARCETQNIDPVVWTNQRVLKWVRDIDLKEYADNLTNSGVHGAVLVLEPTFNAEAMATALGIPSGKHILRRHLAEEMSAVFHPANSTGIREAERFGTPPGRASSVTRTGKEENSSGLKYKAGRLPLGKIGRGFSSKDPDFHDDYGSLQNEDCGDDDPQSRLEQCRLEGYNSLEVTNV

SEQ ID NO: 3712 - protein, 575 aa, Homo sapiens [sequence omitted]

SEQ ID NO: 3713 - protein, 617 aa, Homo sapiens
MGETLKDPVIKRCCEAPNRLSDLQNVSEGLEKCQKSLNDYLDSKRNAFPRFFFISDDELLSILGSSDPLCVQEHMIKMYDNIASLRFNDGDSGEKLVSAMISAEGEVMEFRKIVRAEGRVEDWMTAVLNEMRRTNRLITKEAIFRYCEDRSRVDWMLLYQGMVVLAASQVWWTWEVEDVFHKAQKGEKQAMKNYGRKMHRQIDELVTRITMPLSKNDRKKYNTVLIIDVHARDIVDSFIRGSILEAREFDWESQLRFYWDREPDELNIRQCTGTFGYGYEYMGLNGRLVITPLTDRIYLTLTQALSMYLGGAPAGPAGTGKTETTKDLAKALGLLCVVTNCGEGMDYRAVGKIFSGLAQCGAWGCFDEFNRIDASVLSVISSQIQTIRNALIHQLTTFQFEGQEISLDSRMGIFITMNPGYAGRTELPESVKALFRPVVVIVPDLQQICEIMLFSEGFLEAKTLAKKMTVLYKLAREQLSKQYHYDFGLRALKSVLVMAGELKRGSSDLREDVVLMRALRDMNLPKFVLEDVPLFLGLISDLFPGLDCPRVRYPDFNDAVEQVLEENGYAVLPIQVDKVVQMFETMLTRHTTMVVGPTRGGKSVVINTLCQAQTNLS

SEQ ID NO: 3714 - protein, 180 aa, Homo sapiens
MQFSKPRKLVNTINPGARFMTTAMYDAREAIIPGSVYDRSSQGRPSSMYFQTHDQIGMISAGPSHVAAMNIPIPFNLVMPPMPPPGYFGQANGPAAGEHLWLRLGVALLRALEGVLVCEALASFGSPWTAVFQGEAPRKARLVVGDARRTALGFLDPARLTSPTAKPARMWRHSPSLRAP

SEQ ID NO: 3715 - protein, 111 aa, Homo sapiens
MPPCIQPRKYWTLQRPVCSVNLAPSGPPETHRVSRAVGMPLSLTHPTLFQARHPSLFLTLDYVLVYPLTSGSVSQLIISLSHSLSHSPSRSHSLALLRFTRLAISTSDTLP

SEQ ID NO: 3716 - protein, 138 aa, Homo sapiens [sequence omitted]

SEQ ID NO: 3717 - protein, 252 aa, Homo sapiens
MLHQSGKFLIPDIKEEEKSYQVIRWFSPEDHQKRIKKHFDSYIETALDGRKESEALVKLMEIFGTQCSYLLSRKDIMDSLKNENYDLVFVEAFDFCSFLIAEKLVKPFVAILPTTFGSLDFGLPSPLSYVPVFPSLLTDHMDFWGRVKNFLMFFSFSRSQWDMQSTFDNTIKEHFPEGSRPVLSHLLLKAELWFVNSDFAFDFARPLLPNTVYIGGLMEKPIKPVPQNGQPALFTTPSLFSSGVYPEPLRWL

SEQ ID NO: 3718 - protein, 392 aa, Homo sapiens
MQSGGSLPFCCYLPSVSSQLLLRESYCNFIKRTQCKSSKLMFSRDFLSGQKYCRCLLWALPDHPRRRGPTSANALPLSAELVMLLEWWSCTECTLFTDQATVERFGKEHAVIILNHNFEIDFLCGWTMCERFGVLGSSKVLAKKELLYVPLIGWTWYFLEIVFCKRKWEEDRDTVVEGLRRLSDYPEYMWFLLYCEGTRFTETKHRVSMEVAAAKGLPVLKYHLLPRTKGFTTAVKCLRGTVAAVYDVTLNFRGNKNPSLLGILYGKKYEADMCVRRFPLEDIPLDEKEAAQWLHKLYQEKDALQEIYNQKGMFPGEQFKPARRPWTLLNFLSWATILLSPLFSFVLGVFASGSPLLILTFLGFVGAASFGVRRLIGVTEIEKGSSYGNQEF

SEQ ID NO: 3719 - protein, 148 aa, Homo sapiens
MNYLFLGGCLHEPVSHKFVFFFFFFFFFFFRRTFALVAQAGVQWRNLGSPQPPPPRFKQFSRLSLPSSWDYRHAPSRLANFFFFFVFLVEMGFLHVGQAGLELLTSGDPPTSACQSAGITSVSHHAQPISLFSKKKGGRFLKIFSAFA

SEQ ID NO: 3720 - protein, 152 aa, Homo sapiens
MEAEAWGSQARAGLGAAENCLEGGNQAFLLERVTGTKGRGQGQPLERAGEEGEAGGDPRRDPGEVVAKSRVRARPHLSLYPALPGVALALLCCPLQDRCLRLVPACPTAGPQHPQVLPWALQKQGVVRSGPWATEEMVWGTRTGVGGLTAVF

SEQ ID NO: 3721 - protein, 147 aa, Homo sapiens [sequence omitted]

SEQ ID NO: 3722 - protein, 106 aa, Homo sapiens
MDNPLLKYSAKDYFFKAALCHFIVDELNAKLALEKYEEMFPAFTDSRECKLLKKLLEAHEEQNSEAYTEAVKEFDSISRLDQWLTTMLLRIKKSIQGDGEGDGDLK

SEQ ID NO: 3723 - protein, 532 aa, Homo sapiens
MSIHLREDSSQTHVLMMKGAPERILEFCSTFLLNGQEYSMNDEMKEAFQNAYLELGGLGERVLGFCFLNLPSSFSKGFPFNTDEINFPMDNLCFVGLISMIDPPRAAVPDAVSKCRSAGIKVIMVTGDHPITAKAIAKGVGIISEGTETAEEVAARLKIPISKVDASAAKAIVVHGAELKDIQSKQLDQILQNHPEIVFARTSPQQKLIIVEGCQRLGAVVAVTGDGVNDSPALKKADIGIAMGISGSDVSKQAADMILLDDNFASIVTGVEEGRLIFDNLKKSIMYTLTSNIPEITPFLMFIILGIPLPLGTITILCIDLGTDMVPAISLAYESAESDIMKRLPRNPKTDNLVNHRLIGMAYGQIGMIQALAGFFTYFVILAENGFRPVDLLGIRLHWEDKYLNDLEDSYGQQWTYEQRKVVEFTCQTAFFVTIVVVQWADLIISKTRRNSLFQQGMRNKVLIFGILEETLLAAFLSYTPGMDVALRMYPLKITWWLCAIPYSILIFVYDEIRKLLIRQHPDGWVERETYY

SEQ ID NO: 3724 - protein, 1139 aa, Homo sapiens
MAGIIKKQILKHLSRFTKNLSPDKINLSTLKGEGELKNLELDEEVLQNMLDLPTWLAINKVFCNKASIRIPWTKLKTHPICLSLDKVIMEMSTCEEPRSPNGPSPIATASGQSEYGFAEKVVEGISVSVNSIVIRIGAKAFNASFELSQLRIYSVNAHWEHGDLRFTRIQDPQRGEVLTFKEINWQMIRIEADATQSSHLEIMCAPVRLITNQSKIRVTLKRMLKDCNVIATKLVLILDDLLWVLTDPQLKAMVQYAKSLSEAIEKSTEQRKSMAPEPTQSSTVVASAQQVKTTQTSNAPDVNDAIVKLFNDFDVKETSHHLVISHLDLHICDDIHAKEKESNRRITGGAMQLSFTQLTIDYYPYHKAGDSCNHWMYFSDATKTKNGWANELLHEFECNVEMLKQAVKDHNVGSPPKSPTHASPQHTQTEKDYPLKGTCRTPSVLSQQSKAKLMSSSVVVRLADFNIYQVSTAEQCRSSPKSMICCNKKSLYLPQEMSAVYIEFTEYYYPDGKDFPIPSPNLYSQLNALQFTVDERSILWLNQFLLDLKQSLNQFMAVYKLNDNSKSDEHVDVRVDGLMLKFVIPSEVKSECHQDQPRAISIQSSEMIATNTRHCPNCRHSDLEALFQDFKDCDFFSKTYTSFPKSCDNFNLLHPIFQRHAHEQDTKMHEIYKGNITPQLNKNTLKTSAATDVWAVYFSQFWIDYEGMKSGKGRPISFVDSFPLSIWICQPTRYAESQKEPQTCNQVSLNTSQSESSDLAGRLKRKKLLKEYYSTESEPLTNGGQKPSSSDTFFRFSPSSSEADIHLLVHVHKHVSMQINHYQYLLLLFLHESLILLSENLRKDVEAVTGSPASQTSICIGILLRSAELALLLHPVDQANTLKSPVSESVSPVVPDYLPTENGDFLSSKRKQISRDINRIRSVTVNHMSDNRSMSVDLSHIPLKDPLLFKSASDTNLQKGISFMDYLSDKHLGKISEDESSGLVYKSGSGEIGSETSDKKDSFYTDSSSILNYREDSNILSFDSDGNQNILSSTLTSKGNETIESIFKAEDLLPEAASLSENLDISKEETPPVRTLKSQSSLSGKPKERCPPNLAPLCVSYKNMKRSSSQMSLDTISLDSMILEEQLLESDGSDSHMFL

SEQ ID NO: 3725 - protein, 317 aa, Homo sapiens
MSPSVTAQPLDLGLTITPEPTTEVEHSTPLKKIPPKHPKVTLPHPDQVQTLHSNLTQVTVQPLDLELTLTPESTMEVEPFPTMQKTPTQPPELRKEVVAQPPVYYETSMPTRGQDQAQHPTSPRVTVQPLDLGLTITPESITKVEPSTALMTTAPPPEHLEVTLPPPDKGQAQHSNLTQVTVQPLDLELTITIEPTIDVKPSPTTEETSTQSPDLGLAITPEPTTEIGYSTALEKTIAPRPDQVQTQHRNLTEVTGPPTELEPTQDSLVQSENYAQNKALTAPEEQKASTSTNICDLCTCGDETLSCIDLSPKQRLR

SEQ ID NO: 3726 - protein, 147 aa, Homo sapiens [sequence omitted]

SEQ ID NO: 3727 - protein, 166 aa, Homo sapiens
MFLFHSGLCSDFTSSQGPLLGPSLDWPLCHSRSLPVLYPALHLMSHNSFFFFFETESHSVSRLECNGAISAHCNLCLPGSSDSPASASQVAGTTGVCHHAQLILFVFLVKTGFCHVGQARLELLTSSDPPTSASQSAGITGVSHRTRPCGHITLYVPLSLPRLLAS

SEQ ID NO: 3728 - protein, 164 aa, Homo sapiens
MNNSLDYLAYPVIVSNHRQSTTFRKKLDFGHYVSHKNRIQIAKPTVDTKPPVAHTNHILKLSKLQGEQKKINKIEYENKQLCQKIANAHRGPAKVDCWNEYFSKSLNRETRNRELVRITMENQGILKRLVDRKPHYDRRASEIDWQNSRRYIRNTTRYLLSQNE

SEQ ID NO: 3729 - protein, 109 aa, Homo sapiens
MSHHAKPKPGVQWCKFQSESTGRRARSADVQGQEKMDVTAQEARTNLPFYLFVLFSPGSLGQEAAAVKQSHISAPASELRCIQLRSRSRTRGNKIIWEQGQEGAGLHGR

SEQ ID NO: 3730 - protein, 154 aa, Homo sapiens
MDPASVHPPKLCPPPFIFIFIFIFMFLSITSRRRPRKAKYLDEMLSSLPVRLQPDSNASSRVVLGSCRVREPLKRWPRQAWHAMSPPGAEFRANALCKCLNSADKGHNGEPRVAPQSCPVGANRFHQQILRTPEGTLRMMDEGTFILPGRRRGP

SEQ ID NO: 3731 - protein, 280 aa, Homo sapiens
MTSLTHGMHLTSSTSCSCQSSGTSFTSCSCRSSGTSSTSRSWWSSGTSSTSCSWWSSGTSSTFCSCWSSGTSFTSCSCWSSGTSSTPCSCRSSGTSSTSCSCWSSGTSSTSWSCKSSGTSSTCYMCLSSGTSSTSYSSWSSQTSSTSSMCLPSRTSSIFYSCLPLGHHLPFCSVRPLGPPTTSPLSNLWILSHPFYLGGVWPLNNHLHMNLLGYFNNFHLWPLGLQPLPPPGSPLVHLPPPPLGWPLLSELLQDLNQLPYPLLPVGPRPRPPHVLLGIFI

SEQ ID NO: 3732 - protein, 103 aa, Homo sapiens [sequence omitted]

SEQ ID NO: 3733 - protein, 105 aa, Homo sapiens [sequence omitted]

SEQ ID NO: 3734 - protein, 620 aa, Homo sapiens [sequence omitted]

SEQ ID NO: 3735 - protein, 278 aa, Homo sapiens
MTVCPSLSSCTASASLQLHSVSLSPPAQCQPLSTCTAAGSSSLSTCTASASLHLHSVSLSPPAQRLGAAASPPAQRQPLSTCTASASLHLHSVSLSPPAQRLGAAVSPPAQRQPLSTCTASASPPAQRQPLSTCTVAGSSSLSTCTASASFHLHSVSLSPPAQRLGAAASPPAQRQPLSTCTAAASPPAQRQPLSTCTVAASLHLHSGWEQQPLHLHNSSLSPPAQQLGAAASQGCCKDGVSTCNVRTAPATHCAVCRAVVMVTVGVTGGRELRDSSG

SEQ ID NO: 3736 - protein, 187 aa, Homo sapiens [sequence omitted]

SEQ ID NO: 3737 - protein, 225 aa, Homo sapiens
MLFVFRYCRMLEEGSFRGRTADFVFMFLFGGVLMTVSFPQALEPRARAPRRPACVGPGANTAMPERDTVAVSSLVCVEGPLCAQLQGSGLDLQCCMQNTKPRTKEPGTVPALGAHGLLAAAGQLHPRGPAGDCGGPYLLLPGGRLPQPAWRQEAPADPWLPVSVESPPSLSPPSEGSPPMGTCAGLCSTRAPPHRKLLLDVPAEDPNYLPLPEEQPGPHLPPPQQ

SEQ ID NO: 3738 - protein, 113 aa, Homo sapiens
MENTLYIFFFFLRWSLTLSPRLVCSGVISAHCNLQLLGSSASLASAFRVAGITDLHHHAQLIFVFLVETGFHHVGQVGLELLTSSDPPASVSESAGITGMSHRAWPSLRIFSW

SEQ ID NO: 3739 - protein, 447 aa, Homo sapiens
MPHVLIEKGDMTLGEFDQRLKGRTDFIKGMKKKSRAERKTEIIRKRLHKDIPHHSVIMLNFCPDLQSVQPCLRKAHGEFIFLIDRSSSMSGISMHRVKDAMLVALKSLMPACLFNIIGFGSTFKSLFPSSQTYSEDSLAMACDDIQRMKADMGGTNILSPLKWVIRQPVHRGHPRLLFVITDGAVNNTGKVLELVRNHAFSTRCYSFGIGPNVCHRLVKGLASVSEGSAELLMEGERLQPKMVKSLKKAMAPVLSDVTVEWIFPETTEVLVSPVSASSLFPGERLVGYGIVCDASLHISNPRSDKRRRYSMLHSQESGSSVFYHSQDDGPGLEGGDCAKNSGAPFILGQAKNARLASGDSTTKHDLNLSQRRRAYSTNQITNHKPLPRATMASDPMPAAKRYPLRKARLQDLTNQTSLDVQRWQIDLQAFICLTSEDTFQIRTPTGQ

SEQ ID NO: 3740 - protein, 167 aa, Homo sapiens
MKAKEGRNVYSSSRYDDYDRYRRSRSRSYERRRSRSRSFDYNYRRSYSPRNSRPTGRPRRSRSHSDNDRFKHRNRSFSRSKSNSRSRSKSQPKKEMKAKSRSRSASHTKTRGTSKTDSKTHYKSGSRYEKESRKKEPPRSKSQSRSQSRSRSKSRSRSWTSPKSSGH

SEQ ID NO: 3741 - protein, 114 aa, Homo sapiens [sequence omitted]

SEQ ID NO: 3742 - protein, 274 aa, Homo sapiens
MKPTLLAQQETQKAALRYERAVSMHNAAREMVFVAEQGVMADKNRLDPTWQEMLNHATCKVNEAEEERLRGEREHQRVTRLCQQAEARVQALQKTLRRAIGKSRPYFELKAQFSQILEEHKAKVTELEQQVAQAKTRYSVALRNLEQISEQIHARRRGGLPPHPLGPRRSSPVGAEAGPEDMEDGDSGIEGAEGAGLEEGSSLGPGPAPDTDTLSLLSLRTVASDLQKCDSVEHLRGLSDHVSLDGQELGTRSGGRRGSDGGARGGRHQRSVSL

SEQ ID NO: 3743 - protein, 1085 aa, Homo sapiens [sequence omitted]

SEQ ID NO: 3744 - protein, 1060 aa, Homo sapiens
MGNSITYRDQAAVENHLEQRLHQPQKLLEDLRKTDAQQFRTAMKCLLEDKKDGLDLKDIIIDLGEIRERALQSPGVNRSLFLITLERCFQMLNSLECVEILGKVLRGSSGSFLQPDITERLPRDLREDAFKNLSAVFKDLYDKTSAHSQRALYSWMTGILQTSSNATDDSASWVSAEHLWVLGRYMVHLSFEEITKISPIEIGLFISYDNATKQLDMVYDITPELAQAFLERISSSNFNMRNTSTIHRLGLLVCFYNDLELLDATVAQVLLYQMIKCSHLRGFQAGVQKLKAELLDIAMENQTLNETLGSLSDAVVGLTYSQLESLSPEAVHGAISTLNQVSGWAKSQVIILSAKYLAHEKVLSFYNVSQMGALLAGVSTQAFCSMKRKDISQVLRSAVSQYVSDLSPAQQQGILSKMVQAEDTAPGIVEIQGAFFKEVSLFDLRRQPGFNSTVLKDKELGRSQALFLYELLLKTTRRPEELLSAGQLVKGVTCSHIDAMSTDFFLAHFQDFQNNFALLSPYQVNCLAWKYWEVSRLSMPPFLLAALPARYLASVPASQCVPFLISLGKSWLDSLVLDSHKKTSVLRKVQQCLDDSIADEYTVDIMGNLLCHLPAAIIDRGISPRAWATALHGLRDCPDLNPEQKAAVRLKLLGQYGLPQHWTAETTKDLGPFLVLFSGDELSSIATKFPEILLQAASKMARTLPTKEFLWAVFQSVRNSSDKIPSYDPMPGCHGVVAPSSDDIFKLAEANACWALEDLRCMEEDTFIRTVELLGAVQGFSRPQLMTLKEKAIQVWDMPSYWREHHIVSLGRIALALNESELEQLDLSSIDTVASLSWQTEWTPGQAESILQGYLDDSGYSIQDLKSFHLVGLGATLCAINITEIPLIKISEFRVVVARIGTLLCSTHVLAEFKRKAEVVFGDPTEWTSSVLQELGTIAAGLTKAELRMLDKDLMPYFQPSAIKCLPDEIFKELSAEQIASLGPENAAAVTHAQRRRLSPLQLQSLQQALDGAKTHSWQDAPASAGPTRTSSSRSPAGALQSWGLWLGCPLLVLMAKLLW

SEQ ID NO: 3745 - protein, 108 aa, Homo sapiens
MGKNVSKAVEHINKTIEPALISKHLNVIEQKRIDKLMIETVDPDNRSKFGVNIILGISFAVCKAGAAEKGFSLLSQNCEFAGNSEGILLVPAFTVTSNGSQSGNKLAV

SEQ ID NO: 3746 - protein, 1557 aa, Homo sapiens
MQNIPFPSPQRPRILVQLSVHDALILSQPVSTPLPLSGANFSTLLMNLGPENCATLLLFVLLESKILLHSLRPAVLTGVAEAVVAMIFPFQWQCPYIPLCPLSLAAVLSAPLPFIVGVDSRYFDLHDPPQDVVCIDLDTNMLYVSDEKKNMNWKQLPKKPCKNLLSTLKKLYPQLSSVHQKTQEGSAIDMTPIEADFSWQKKMTQLEMEIQEAFLRFMASILKGYRTYLRPITEAPSNKATAADSLFDRQGFLKSRDRAYAKFYTLLSKTQIFIRFIEECSFVSDKDTGLAFFDDCIEKLFPDKGTEKTDKVDFDSAEDTRLIELDDSQKGEHTVFIMPPEPPPDDGKDLSPKYSYKYFPRLDLKLFDRPQELKLCFSRHPTGNSITKSPPLMAKRTKQEIKTAHKLAKRCYTNPPQWAKCLFSHCYSLWFICLPAYVRVSHPKVRALQQAYDVLIKMRKTDVDPLDEVCYRVVMQLCGLWGHPVLAVRVLFEMKTARIKPNAITYGYYNKVVLESPWPSSTRSGIFLWTKVRNVVRGLAQFRQPLKKTVQRSQVSSISGGQSDQGYGSKDELIKDDAEIHVPEEQAARELITKTKMQTEEVCDASAIVAKHSQPSPEPHSPTEPPAWGSSIVKVPSGIFDVNSRKSSTGSISNVLFSTQDPVEDAVFGEATNLKKNGDRGEKRQKHFPERSCSFSSESRAGMLLKKSSLDSNSSEMAIMMGADAKILTAALTCPKTSLLHIARTHSFENVSCHLPDSRTCMSESTWNPEHRSSPVPEMLEESQELLEPVVDDVPKTTATVDTYESLLSDSNSNQSRDLKTVSKDLRNKRSSLYGIAKVVQREDVETGLDPLSLLATECTGGKTPDSEDKLFSPVIARNLADEIESYMNLKSPLGSKSSSMELHREENRESGMTTAFIHALERRSSLPLDHGSPAQENPESEKSSPAVSRSKTFTGRFKQQTPSRTHKERSTSLSALVRSSPHGSLGSVVNSLSGLKLDNILSGPKIDVLKSGMKQAATVASKMWVAVASAYSYSDDEEETNRDYSFPAGLEDHILGENISPNTSISGLVPSELTQSNTSLGSSSSSGDVGKLHYPTGEVPFPRGMKGQDFEKSDHGSSQNTSMSSIYQNCAMEVLMSSCSQCRACGALVYDEEIMAGWTADDSNLNTACPFCKSNFLPLLNIEFKDLRGSASFFLKPSTSGDSLQSGSIPLANESLEHKPVSSLAEPDLINFMDFPKHNQIITEETGSAVEPSDEIKRASGDVQTMKISSVPNSLSKRNVSLTRSHSVGGPLQNIDFTQRPFHGISTVSLPNSLQEVVDPLGKRPNPPPVSVPYLSPLVLRKELESLLENEGDQVIHTSSFINQHPIIFWNLVWYFRRLDLPSNLPGLILTSEHCNEGVQLPLSSLSQDSKLVYIQLLWDNINLHQEPREPLYVSWRNFNSEKKSSLLSEEQQETSTLVETIRQSIQHNNVLKPINLLSQQMKPGMKRQRSLYREILFLSLVSLGRENIDIEAFDNEYGIAYNSLSSEILERLQKIDAPPSASVEWCRKCFGAPLI

SEQ ID NO: 3747 - protein, 288 aa, Homo sapiens
MYVFQLFDYYSASGTTLLWQAFWECVVVVWVYGADRFTDDIACMIGYRPCPWMKWCWSFFTPLVCMGIFIFNVVYYKPLVYKNTNVYPWWGEAMGWAFVLSSMLCMPLHLLGCLLRAKGTMAECWKHLTQPIWGLHHLEYRAQDADVRGLTTLTPVSESSKVVVVESVMGQLSSHHQLTSGLWGKRLQYSILGVWAANLACSGFPPCALGWAHPREGTPDTAPTSRLKADALPAPPVFCVAALTHVCLSRPVPRRLSDPKKGFPDTRTEAGGLGLGEGGGPAGTFLLC

SEQ ID NO: 3748 - protein, 113 aa, Homo sapiens
MVSVFRSCDLPTLASQRAGIIGVSHCARPTVRFFLFLFFFFEMESSSVTRLECSDVISAHHNLRPPGSSDSPALDSQVARITGMRHHTQLIFVFLVETGFHHIGQDGLHLLTS

SEQ ID NO: 3749 - protein, 1445 aa, Homo sapiens
MGNLVIPLGKGRAGRVESGQRIPPPAPRPSVECTGDDIALQMEKMLFPLKSPSATWLSPSSTPWMMDFILTSVCGLVLLFLLLLYVHSDPPSPPPGRKRSSREPQRERSGRSRSRKISALKACRILLRELEETRDLNYLLESHLRKLAGEGSSHLPLGGDPLGDVCKPVPAKAHQPHGKCMQDPSPASLSPPAPPAPLASTLSPGPMTFSEPFGPHSTLSASGPPEPLLPLKCPATQPHVVFPPSPQPHGPLASSPPPPDSSLAGLQCGSTTCPVPQSSPLHNQVLPPPTRVISGLGCSSDPIWDLYCWREAATTWGLSTYSHGKSQPRHLPDHPSEASFWGDPTPKHMEVGGCTFIHPDVQKLLETLIAKRALMKMWQEKERKRADHPHMTSLGKEWDITTLNPFWNVSTQPQQLPRPQQVSDATTVGNHLQQKRSQLFWDLPSLNSESLATTVWVSRNPSSQNAHSVPLDKASTSLPGEPEVEASSQLSQAPPQPHHMAQPQHFTPAWPQSQPPPLAEIQTQAHLSPPVPSLGCSSPPQIRGCGASYPTSQERTQSVIPTGKEYLEWPLKKRPKWKRVLPSLLKKSQAVLSQPTAHLPQERPASWSPKSAPILPGVVTSPELPEHWWQGRNAIHQEQSCGPPSRLQASGDLLQPDGEFPGRPQSQAEDTQQALLPSQPSEFAGKGRKDVQKTGFRSSGRFSDKGCLGSKLGPDPSRDQGSGRTSVKALDEDKEAEGDLRRSWKYQSVSSTPRDPDKEHLENKLQIHLARKVGEIKEGWIPMPVRRSWLMAKCAVPKSDTHRKPEKLASWRGGKAHVNTSQELSFLHPCTQQILEVHLVRFCVRHSWGTDLQSLEPINVWSGEAQAPPFPQSTFTPWASWVSRVESVPKVPIFLGKRPQSGPGDNRTTSKSVPTVSGPLAAPPPEQEGVQRPPRGSQSADTHGRSEAFPTGHKGRGCSQPPTCSLVGRTWQSRTVLESGKPKPRLEGSMGSEMAGNEAWLESESMSPGDPCSSRALQELSIGSQWARAEDALQALKVGEKPPTWEVTLGASVRASSGSVQEDLRSTGALGTTGNPSASSVCVAQDPEQLHLKAQVVSEIALIVQVDSEEQLPGRAPGILLQDGATGLCLPGRHMDMLTAADRLPTQAPLSTSQSVSGKNMTASQGPCALLWKGGDSPGQQEPGSPKAKAPQKSQKTLGCAGKGEAHRRPRTGEQGHRSKGPRTSEASGRSHPAQAREIGDKQERKYNQLQLEKGQTPPESHFQRKISHHPQGLHPRKGGTRWEDVLQKGKPGADAFQSWGSGPPRQFMDCMADKAWTISRVVGQILVDKLGLQWGRGPSEVNRHKGDFHAQENVPSCCHRGHCHQERSREMRALACSPKATPKGHHCPVKNRGIRDRDSSWAPPPREPVSPAGPHHHRPRMASTSGGPHPQLQELMSAQRCLAS

SEQ ID NO: 3750 - protein, 138 aa, Homo sapiens [sequence omitted]

SEQ ID NO: 3751 - protein, 917 aa, Homo sapiens
MENILCFLNSYTETVLSPDSHCLDIDLNFICLSGLGLFILYLFYMVLTLYSSPTEKNNDTQKHQGRARRKRKSVTFKDRKSLQKEAEEERKLHSFLKSFGPPVSCSPLGQHHDTTLFRRLLCPDPVCRVCNRATADIQRLLSWESLKDAAPSVSPLASSASGAESSFTLASTPSATTPEDLILSSRPKPSPPPPLILSPDLITTLADLFSPSPLRDPLPPQPVSPLDSKFPIDHSPPQQLPFPLLPPHHIERVEPSLQPEASLSLNTIFSFGSTLCQDISQAVNRTDSCARHHGPPTPSALPPEDCTVTQSKSNLTVLKTFPEMLSLGGSGGSSTSAPTTKGIDHSCPASSEFSWWQPHAKDSFSSNFVPSDFMEELLTLHSSEASLGGHSVANIIQPVNISFLSHDIPALLERQVKRRGDFLMWKENGKKPGSFPTQLRPNYQLNSSRNMLTSTAVKHDLAESFPFWASKGKLEWQHIHQQPPYSKCFEDHLEQKYVQLFWGLPSLHSESLHPTVFVQHGRSSMFVFFNGITNTSMSHESPVLPPPQPLFLPSTQPLPLPQTLPRGQSLHLTQVKSLAQPQSPFPALPPSPLFLIRVCGVCFHRPQNEARSLMPSEINHLEWNVLQKVQESVWGLPSVVQKSQEDFCPPAPNPVLVRKSFKVHVPISIIPGDFPLSSEVRKKLEQHIRRRLIQRRWGLPRRIHESLSLLRPQNKISELSVSESIHGPLNISLVEGQRCNVLKKSASSFPRSFHERSSNMLSMENVGNYQGCSQETAPKNHLLHDPETSSEEDLRSNSERDLGTHMMHLSGNDSGVRLGQKQLENALTVHLSKKFEEINEGRMPGTVHSSWHSVKQTICLPEKSHSQIKHRNLAALVSEDHGVDTSQEMSFLSSNKQKMLEAHIKSFHMKPILNLSI

SEQ ID NO: 3752 - protein, 1318 aa, Homo sapiens
MDRQCSEKPHSCTPTGRVSSAVSQNSRISPPVSTSMKDSSCMEVHQDSARRDRWSHPTTILLHKSQSSQATLMPQEHRMFMGEAYSAATCFKMLQDMNSADPFHLKYIIKKIKNMAHGSPKLVMETIHDYFIDNPEISSRHKFRLFQTLEMVIGASDVLEETWEKTFTRLALENMTKATELEDIYQDAASNMLVAICRHSWRVVAQHLETELLTGVFPHRSLLYVMGVLSSSEELFSQEDKACWEEQLIQMAIKSVPFLSTDVWSKELLWTLTTPSWTQQEQSPEKAFMFTYYGLILQAEKNGATVRRHLQALLETSHQWPKQREGMALTSGLAATRHLDDVWAVLDQFGRSRPIRWSLPSSSPKNSEDLRWKWASSTILLAYGQVAAKARAHILPWVDNIVSRMVFYFHYSSWDETLKQSFLTATLMLMGAVSRSEGAHSYEFFQTSELLQCLMVLMEKEPQDTLCTRSRQQAMHIASSLCKLRPPIDLERKSQLLSTCFRSVFALPLLDALEKHTCLFLEPPNIQLWPVARERAGWTHQGWGPRAVLHCSEHLQSLYSRTMEALDFMLQSLIMQNPTADELHFLLSHLYIWLASEKAHERQRAVHSCMILLKFLNHNGYLDPKEDFKRIGQLVGILGMLCQDPDRATQRCSLEGASHLYQLLMCHKTGEALQAESQAPKELSQAHSDGAPLWNSRDQKATPLGPQEMAKNHIFQLCSFQVIKNIMQQLTLAELSDLIWTAIDGLGSTSPFRVQAASEMLLTAVQEHGAKLEIVSSMAQAIRLRLCSVHIPQAKEKTLHAITLLARSHTCELVATFLNISIPLDSHTFQLWRALGAEQPTSHLVLTTLLACLQERPLPTGASDSSPCPKEKTYLRLLAAMNMLHELQFAREFKQAVQEGYPKLFLALLTQMHYVLELNLPSEPQPKQQAQEAAVPSPQSCSTSLEALKSLLSTTGHWHDFAHLELQGSWELFTTIHTYPKGVGPLARAMVQNHCRQIPAVLRQLLPSLQSPQERERKVAILILTKFLYSPVLLEVLPKQAALTVLAQGLHDPSPEVRVLSLQGLSNILFHPDKGSLLQGQLRPLLDSFFQSSDQVIVCIMGTVSDTLHRLGAQGTGSQSLGVAISTRSFFNDERDGIRAAAMALFGDLVAAMADRELSGLRTQVHQSMVPLLLHLKDQCPAVATQAKFTFYRCAVLLRWRLLHTLFCTLAWERGLSARHFLWTCLMTRSQEEFSIHLSQALSYLHSHSCHIKTWVTLFIGHTICYHPQAVFQMLNAVDTNLLFRTFEHLRSDPEPSIREFATSQLSFLQKVSARPKQ

SEQ ID NO: 3753 - protein, 240 aa, Homo sapiens
MPPAPASPPLSLPGRDGRRLCLPLPDLPCPGEVDTKHVLGNLLPTHGAVQAAASQPWSLLGVHSPIATPAPLRGQIPISLSCLQDEYRGPSAGQSQELWKCSLQRPHLDAPRGCPLAESTGRVEAASAMSAAHVPGAHPRRRLCLLAAPTDFLSFLWSALPPSLPPPYPQRHLLTPSSMLCPGWDASWAVPGPRLEPLPLFLWVSPCPAAGNLRVLSKKSCKLARPGRAEASFLPDGWFA

SEQ ID NO: 3754 - protein, 125 aa, Homo sapiens
MWSLPGGLLSGLATHPWQHCPISGLDFLRSCRGHSLQPRRGSPLVQPKLSMGLEHPCQPCAPSTPRSRFSSVSQQRGSVLPSLCVSWAKTWGALGQGWCFPQAHLGRGLAPSLAQVLSSALVALE

SEQ ID NO: 3755 - protein, 890 aa, Homo sapiens
MMMVMQPEGLGAGEGRFAGGGGGGEYMEQEEDWDRDLLLDPAWCNSHLRKAGTQIENIEEDFRNGLKLMLLLEVISGERLPRPDKGKMRFHKIANVNKALDFIASKGVKLVSIGAEEIVDGNLKMTLGMIWTIILRFAIQDISVEETSAKEGLLLWCQRKTAPYRNVNVQNFHTSWKDGLALCALIHRHRPDLIDYAKLRKDDPIGNLNTAFEVAEKYLDIPKMLDAEDIVNTPKPDEKAIMTYVSCFYHAFAGAEQAETAANRICKVLAVNQENEKLMEEYEKLASELLEWIRRTVPWLENRVGEPSMSAMQRKLEDFRDYRRLHKPPRIQEKCQLEINFNTLQTKLRLSHRPAFMPSEGKLVSDIANAWRGLEQVEKGYEDWLLSEIRRLQRLQHLAEKFRQKASLHEAWTRGKEEMLSQRDYDSALLQEVRALLRRHEAFESDLAAHQDRVEHIAALAQELNELDYHEAASVNSRCQAICDQWDNLGTLTQKRRDALERMEKLLETIDQLQLEFARRAAPFNNWLDGAVEDLQDVWLVHSVEETQSLLTAHDQFKATLPEADRERGAIMGIQGEIQKICQTYGLRPCSTNPYITLSPQDINTKWDMVRKLVPSRDQTLQEELARQQVNERLRRQFAAQANAIGPWIQAKVEEVGRLAAGLAGSLEEQMAGLRQQEQNIINYKTNIDRLEGDHQLLQESLVFDSKHTVYSMEHIRVGWEQLLTSIARTINEVENQVLTRDAKGLSQEQLNEFRASFNHFDRKRNGMMEPDDFRACLISMGYDLGEVEFARIMTMVDPNAAGVVTFQAFIDFMTRETAETDTTEQVVASFKILAGDKNYITPEELRRELPAKQAEYCIRRMVPYKGSGAPAGALDYVAFSSALYGESDL

SEQ ID NO: 3756 - protein, 279 aa, Homo sapiens [sequence omitted]

SEQ ID NO: 3757 - protein, 255 aa, Homo sapiens
MMSIFLMGCYDPGSQKWCTVTKCAGGHDDATLARLQNELDMVKISKDPSKIPSWLKVNKIYYPDFIVPDPKKAAVWEITGAEFSKSEAHTADGISIRFPRCTRIRDDKDWKSATNLPQLKELYQLSKEKADFTVVAGDEGSSTTGGSSEENKGPSGSAVSRKAPSKPSASTKKAEGKLSNSNSKDGNMQTAKPSAMKVGEKLATKSSPVKVGEKRKAADETLCQTKVRVKTATHHVGQFSPGCVPNLLYKKFERG

SEQ ID NO: 3758 - protein, 202 aa, Homo sapiens
MNVPRSQPASKELLKGELSMYNNERRFRIRSQDSYNPFILLFFSRRSLSLSPRLECSGVILAHCNLHLPGSSDSPASASRVAGITVARHHAWLIFVFLVETGFHHVGQAGLELLTSGDPPTSASQSAGITGVSHHTRFILLFTHSSFNKHTVEIHISVSAFNHRKSELSTQLLMCWIHEKCSVCFNLLALKYCMQSVGFNSL

SEQ ID NO: 3759 - protein, 108 aa, Homo sapiens
MSAAFPGASLYLPMAQSVAVGPLGSTIPMAYYPVGPIYPPGSTVLVEGGYDAGARFGAGATAGNIPPPPPGCPPNAAQLAVMQGANVLVTQRKGNFFMGGSDGGYTIW

SEQ ID NO: 3760 - protein, 377 aa, Homo sapiens [sequence omitted]

SEQ ID NO: 3761 - protein, 156 aa, Homo sapiens [sequence omitted]

SEQ ID NO: 3762 - protein, 147 aa, Homo sapiens [sequence omitted]

SEQ ID NO: 3763 - protein, 367 aa, Homo sapiens; identical to SEQ ID NO: 3110

SEQ ID NO: 3764 - protein, 109 aa, Homo sapiens [sequence omitted]

SEQ ID NO: 3765 - protein, 274 aa, Homo sapiens
MSQSKHTEARELMYSGALLFFSHGQQNSAADLSMLVLESLEKAEVEVADELLENLAKVFSLMDPNSPERVTFVSRALKWSSGGSGKLGHPRLHQLLALTLWKEQNYCESRYHFLHSADGEGCANMLVEYSTSRGFRSEVDMFVAQAVLQFLCLKNKSSASVVFTTYTQKHPSIEDGPPFVEPLLNFIWFLLLAVDGGKLTVFTVLCEQYQPSLRRDPMYNEYLDRIGQLFFGVPPKQTSSYGGLLGNLLTSLMGSSEQEDGEESPSDGSPIELD

SEQ ID NO: 3766 - protein, 798 aa, Homo sapiens
MIVALREALTSTNPKAALKSKIVAEFRSQALIEELLLYKRSEDQIELKEKQLSTMRVDVCSTETLKCLKDKTGGKKFSKEFEEASSKLEEFVNGLDKQVKNGPSLTEALENAGIFYEAQYKEVKVVANAYKTFANRVNNLKKKLDQLKSTLPDPEESPVPSPSMDAPSPTGSESPFQGMGGEESQSPTVESEKSATPEPVTDNRDVEDMELSDVEDDGSKIIVEDRKEKPAEKSAVSTSVPTKPTENISKASSCTPVPVTMTATPPLPKPVNTSLSPSPALALPNLANVDLAKISSILSSLTSVMKNTGVSPASRPSPGTPTSPSNLTSGLKTPAPATTTSHNPLANILSKVEITPESILSALSKTQTQSAPALQGLSSLLQSVTGNPVPASEAASQSTSASPANTTVSTIKGRNLPSSAQPFIPKSFNYSPNSSTSEVSSTSASKASIGQSPGLPSTTFKLPSNSLGFTATHNTSPAAPPTEVTICQSSEVSKPKLESESTSPSLEMKIHNFLKGNPGFSGLNLNIPILSSLGSSAPSESHPSDFQRGPTSTSIDNIDGTPVRDERSGTPTQDEMMDKPTSSSVDTMSLLSKIISPGSSTPSSTRSPPPGRDESYPRELSNSVSTYRPFGLGSESPYKQPSDGMERPSSLMDSSQEKFYPDTSFQEDEDYRDFEYSGPPPSAMMNLEKKPAKSILKSSKLSDTTEYQPILSSYSHRAQEFGVKPAFPPSVRALLDSSENCDRLSSSPGLFGAFSVRGNEPGSDRSPSPKHPCRSHGSPTHVRRGESPGLHHFHHVDD

SEQ ID NO: 3767 - protein, 314 aa, Homo sapiens
MAATNLENQLHSAQKNLLFLQREHASTLKGLHSEIRRLQQHCTDLTYELTVKSSEQTGDGTSKSSELKKRCEELEAQLKVKENENAELLKELEQKNAMITVLENTIKEREKKYLEELKAKSHKLTLLSSELEQRASTIAYLTSQLHAAKKKLMSSSGTSDASPSGSPVLASYKPAPPKDKLPETPRRRMKKSLSAPLHPEFEEVYRFGAESRKLLLREPVDAMPDPTPFLLARESAEVHLIKERPLVIPPIASDRSGEQHSPAREKPHKAHVGVAHRIHHATPPQAQPEVKTLAVDQVNGGKVVRKHSGTDRTV

SEQ ID NO: 3768 - protein, 274 aa, Homo sapiens
MTRAVNLSCETTEGETTFSKNRAQTVPVSLSPNCSMAWSAANVSAALKGKALLWSQHAELASTPLRAAPHQHWLGLNLSSLAPRCKPWNANPKGQTPRGSQVPGADTFLALAVMAQMEAKTTPLSTGRLVLLPREQEPRHRLCTEFSIYFSQGGYAKAVCLSLSGSHLQPVPVDSVGSTVMLGKDPNTRTKHVDSCQCQNGRKQGKGSWLRPFANRVQRCRHLEPARSYQTGSHLCLQRLLSQRQDRGAWLCQVSFWDEPILLSQVGHDGEARR

SEQ ID NO: 3769 - protein, 121 aa, Homo sapiens
MRNHFKFLSKKDKMAAARRRAWREGERAAGSLTRGLQLEPWHWQGAWRRKRRKTVSRQDHPNRSSKLPWTSLPCPHREAAGDRAYLGNTNHGSDTSEMSCRASASTLIQTLSFSELLQAPG

SEQ ID NO: 3770 - protein, 147 aa, Homo sapiens [sequence omitted]

SEQ ID NO: 3771 - protein, 113 aa, Homo sapiens
MCVCMSLTSISGRVTKNLSIHPRQQGCFILRARLGFEGDFIRMESLWLTNNCLLKYQALLLKGSAVQLKTCPCLSPATFSQRKLENLNMIVNRMASGGLGLLGETENAPQIPF

SEQ ID NO: 3772 - protein, 850 aa, Homo sapiens
MIANISPSHVATEHTLNTLRYADRVKELKKGIKCCTSVTSRNRTSGNSSPKRIQSSPGALSEDKCSPKKVKLGFQQSLTVAAPGSTRGKVHPLTSHPPNIPFTSAPKVSGKRGGSRGSPSQEWVIHASPVKGTVRSGHVAKKKPEESAPLCSEKNRMGNKTVLGWESRASGPGEGLVRGKLSTKCKKVQTVQPVQKQLVSRVELSFGNAHHRAEYSQDSQRGTPARPASEAWTNIPPHQKEREEHLRFYHQQFQQPPLLQQKLKYQPLKRSLRQYRPPEGQLTNETPPLFHSYSENHDGAQVEELDDSDFSEDSFSHIFSQRATKQRNTLENSEDSFFLHQTWGQGPEKQVAERQQSLFSSPRTGDKKDLTKSWVDSRDPINHRRAALDHSCSPSKGPVDWSRENSTSSGPSPRDSLAEKPYCSQVDFIYRQERGGGSSFDLRKDASQSEVSGENEGNLPSPEEDGFTISLSHVAVPGSPDQRDTVTTPLREVSADGPIQVTSTVKNGHAVPGEDPRGQLGTHAEYASGLMSPLTMSLLENPDNEGSPPSEQLVQDGATHSLVAESTGGPVVSHTVPSGDQEAALPVSSATRHLWLSSSPPDNKPGGDLPALSPSPIRQHPADKLPSREADLGEACQSRETVLFSHEHMGSEQYDADAEETGLDGSWGFPGKPFTTIHMGVPHSGPTLTPRTGSSDVADQLWAQERKHPTRLGWQEFGLSTDPIKLPCNSENVTWLKPRPISRCLARPSSPLVPSCSPKTAGTLRQPTLEQAQQVVIRAHQEQLDEMAELGFKEETLMSQLASNDFEDFVTQLDEIMVLKSKCIQSLRSQLQLYLTCHGPTAAPEGTVPS

SEQ ID NO: 3773 - protein, 102 aa, Homo sapiens [sequence omitted]

SEQ ID NO: 3774 - protein, 243 aa, Homo sapiens
MMGSRRKVLLTSQMGQLGKGAPHFPDGVAVRQRCSSQPRRGSQAVALLTSQTGLPGRGAPHFPEGVAGQRRSSTARLGSRQEELLTSKMMGGRAEALPTSQTGRPGRGAPHLPDRVAGQRRSSPPRRGGRAEALHTSQMGWWPDRGAPHNLDGAAGQRHSPLPRRGSRAEWPGRGTPHNPDGAAGQRRSSPPRWGSREEALLTSQTLGGQAEALLTSQMGWLGRGAPHFPDKVAGQRRYSPPR

SEQ ID NO: 3775 - protein, 281 aa, Homo sapiens
MGETQGPGPQFSVLCPSSVHLCNNSIQKHLENSCHRHPLLPPDNMWSSQRFQAHLQEMGAPNAWSTIIVPGMKDAVIHALQTSQDTVQCRKASFELYGADFVFGEDFQPWLIEINASPTMAPSTAVTARLCAGVQADTLRVVIDRRLDRNCDTGAFELIYKQPAVEVPQYVGIRLLVEGFTIKKPMAMCHRRMGVRPAVPLLTQRGSGEAEVSGSLRKLPKVAQLRRGTAGMQTQPVTTSPASTPRPSCLLPMYSDTRARSSDDSTASWWALRPCRPQARP

SEQ ID NO: 3776 - protein, 470 aa, Homo sapiens
MNEENIDGTNGCSKVRTGIQNEAALLALMEKTGYNMVQENGQRKFGGPPPGWEGPPPPRGCEVFVGKIPRDMYEDELVPVFERAGKIYEFRLMMEFSGENRGYAFVMYTTKEEAQLAIRILNNYEIRPGKFIGVCVSLDNCRLFIGAIPKEKKKEEILDEMKKVTEGVVDVIVYPSATDKTKNRGFAFVEYESHRAAAMARRKLIPGTFQLWGHTIQVDWADPEKEVDEETMQRVKVLYVRNLMISTTEETIKAEFNKFKPGAVERVKKLRDYAFVHFFNREDAVAAMSVMNGKCIDGASIEVTLAKPVNKENTWRQHLNGQISPNSENLIVFANKEESHPKTLGKLPTLPARLNGQHSPSPPEVERCTYPFYPGTKLTPISMYSLKSNHFNSAVMHLDYYCNKNNWAPPEYYLYSTTSQDGKVLLVYKIVIPAIANGSQSYFMPDKLCTTLEDAKELAAQFTLLHLGPF

SEQ ID NO: 3777 - protein, 382 aa, Homo sapiens
MFCLEAIVKHSEISTHCDKIEANGGLQLLQRLYRLHKDCPKVQRNIMRVIGNMALNEHLHSSIVRSGWVSIMAEAMKSPHIMESSHAARILANLDRETVQEKYQDGVYVLHPQYRTSQPIKADVLFIHGLMGAAFKTWRQQDSEQAVIEKPMEDEDRYTTCWPKTWLAKDCPALRIISVEYDTSLSDWRARCPMERKSIAFRSNELLRKLRAAGVGDRPVVWISHSMGGLLVKKMLLEASTKPEMSTVINNTRGIIFYSVPHHGSRLAEYSVNIRYLLFPSLEVKELSKDSPALKTLQDDFLEFAKDKNFQVLNFVETLPTYIGSMIKLHVVPVESADLGIGDLIPVDVNHLNICKPKKKDAFLYQRTLQFIREALAKDLEN

SEQ ID NO: 3778 - protein, 164 aa, Homo sapiens
MFQRLNKMFVGEVSSSSNQEPEFNEKEDDEWILVDFIDTCTGFSAEGEEEEEDISEESPTEHPSVFSCLPASLECLADTSDSCFLQFESCPMEESWFITPPPCFTAGGLTTIKVETSPMENLLIEHPSMSVYAVHNSCPGLSEATRGTDELHSPSSPRARKSCL

SEQ ID NO: 3779 - protein, 252 aa, Homo sapiens
MWPDGSSFTGTFYLSHREGYGTMYMKTRLFQTHCHNDIVNLLLDCGADVNKCSDEGLTALSMCFLLHYPAQSFKPNVAERTIPEPQEPPKFPVVPILSSSFMDTNLESLYYEVNVPSQGSYELRPPPAPLLLPRVSGSHEGGHFQDTGQCGGSMDHRSSSLKGDSPLVKGSLGHVESGLEDVLGNTDRGSLCSAETKFESNVCVCDFSIELSQAMLERSAQSHSLLKMASPSPCTSSFDKGTMRRMALSMIE

SEQ ID NO: 3780 - protein, 125 aa, Homo sapiens [sequence omitted]

SEQ ID NO: 3781 - protein, 179 aa, Homo sapiens [sequence omitted]

SEQ ID NO: 3782 - protein, 1028 aa, Homo sapiens
MDDQYRTLMRISVADPMVLSLVVPSAERSPYFQGQQLQQLLQAGSVELEGIIMSLESVLYGVCAHFPRLFFLSDSELVALLAARLESCEAQLWVRRCFPHVHAVSFRSCPTGEKNTDDWESSPNTQTQVEALAVLGAGGEEVKLQGPLPLHPDLPKWLASLEKCLRLALVHMLQGCVAARLARGPSLGEALKQLPKQNKLYLQLYVQHWIDLVQAFPWQCVLVAEEVVWRAEMEEALLEWGTLAMVSMHMRKLEVLVNFMRAQRASQGGQSLPSVRQTSLLSALLVMAVTHRDIAQLLEQHQVSDLTDFHWVRQLKYHLGSPHIIPKSPLQSLKTIASSEPSLSPAACWIDVLGRSFLYNYEYLGPRLGPLPSLLPERPALVLLLALEEVACGTVLGPNGVGKRAIVNSLAQALGRQLVMLPCSPQIEAQCLSNYLNGALQGGAWLLLEKVHQLPPGLLSALGQRLGELHHLYAPLYQEASRNTSTIDPTQPQLLGSSFFEKHHVSVRLGYGCLLVLRALSSAVPANLHLLLRPVALALPDLRQVAELTLLGAGMRDAFQMATRLSKFFSLERELVSGPLPCRLPLLKQILEDTIRTLNVTKEEPKCQKPRSLAAIEEAALLHALLRSPLFSILNGLHLHNLRGLLCALFPSASQVLAEPMTYKLMKPLVVEELQQVGLDPSPDILGSLEQLSQALSRASGILLLGPAGSGKTICWHSLFKIQNRLAAMEDTSTQGCQPVEITHLYPSGLSPQEFLGWLEGSCWHHGIFPKVLRAAGQCNNMGQKRQTEESIGIQHWIICDGASNGAWLDSITCLLSELPQLSLPSGQQIARPPGTFLLMEVADTTGISPTVVGCCALVWCGGEQTWQCILSALMASLPYEYRLQHRTVAELNHMAEVLVPATLRFLTCQGVSSLLQVHGQQAVCAGVAEVTSMARILHSLLDLHLRLKEEKAPGPEDLSYSDPVAQSFRSSKSSFLNRSQVDSDDVPDKCREHLLAVSSFLFALIWGFGAHLPSRYLPGWGMGDAEG

SEQ ID NO: 3783 - protein, 119 aa, Homo sapiens [sequence omitted]

SEQ ID NO: 3784 - protein, 139 aa, Homo sapiens [sequence omitted]

SEQ ID NO: 3785 - protein, 1224 aa, Homo sapiens
MTCTKNPQNLNQIHEETAKKAQNLVLPNRKSPSPVAPHPSTFVATPASHNLVNQTNGTTKESALLLHVLLMVPDGKDFISGESEKQSPCNVYLNCKLFSTEEVTRSVIAWGTTQPVFNFSQVIPVSLSSKYLERLKNNVMVIETWNKVRSPGQDKLLGLVKLPLHQFYMSFKDAKISRLLLDAQYPVVAVDSYMPVIDVFSGHQNGSLRVFLAMGSSNQIMALQRLKNEEGTLPPFSPRPAHFLDQPTAASVAMAEDRGNGLMEHCFEIHIEMVKGLAPLQATVWGEADCYVQYYFPVQHSQSSVLKGPEFLENGITLKPFRTATTLCVPDPIFNSEHHHSLLLPAEVPVQRLLLSAFSAQGLVPGGGVQFEIWCRYYYPNVRDQKVAKGTLPLSRICAMVTTQHREDVGIQTFNLPLTPRIENRKELRNQSSGLLDVGLRYRRSPRTAEGVLAARTVSISVQIIRACGLQAAAKALAEQEPALQFSATVGVNASVTTHLSFLPQGEQRRTHPVACSFCPEFSHHVEFTCNLVTQHCSGEACFLAELLEFAEVIFAVYHENTKSASDIISIESCKEYLLGVVKVPTKELLIKRSGITGWYPIILPEDGGLPHGLELMQKIVGGLELSISFTHRGDRERVLEAAEHLGWSFENSLKDFVRMDEGEPATVTISTPRLWLPIHCVLLAGHNHIHKNTYCYLRYKFYDHEAFWTPLKKPKESVNKKQIMVTFKASKRAEVTRGPSLLWYFREERLEIQVWRAYGNDSVERPHQTDSWIGSAYVDLARLGERSARTLTVSGVYPLFGRNASNLSGAALRVHVVLSSLSSHLEPTHELDSMDCSSHSESEQLPRRNDEVQLSPPEVISCHQKSPASTQVPCSSTTAEVRLTREGPADLDGTFAVSILVERAMHLSLKGSPLTERKVSIPSCCVSFATADESSPVYTQVVENTDSPIWNFQQQSRLSKELLLDPQQTLVFKVWHKGDEERVIGFASVDLSPLLSGFQFVCGWYNITDFSGECQGQIKVAVSPLESLIHFKEERQERRGVETSKSLIPIYSPFSFPASDTYAAFSSHMARQTLDQLAHASSKELDFSSPGRSDTTRSQASRHEEHVQNIRRFHESLHLQGEAPLPCDDKLTTSPLSSQTSILTSLRKNLSELDQIQRYFRQKLTKPFLPLSPQTQTAISQHQESCRDHLGPGASSLDPGSQCILEKSSNLVLQVSSLITGSY

SEQ ID NO: 3786 - protein, 186 aa, Homo sapiens [sequence omitted]

SEQ ID NO: 3787 - protein, 773 aa, Homo sapiens
MEEELDKMEREACCFGSEDESSSKAETEYSFDDWDWQNGSLSSLSLPESTREAKSNLNNMSTTEEYLISKCVLDLKIMQTIMHENDDRLRNIEQILDEVEMKQKEQEERMSLWATSREFTNAYKLPLAVGPPSLNYIPPVLQLSGGQKPDTSGNYPTLPRFPRMLPTLCDPGKQNTDEQFQCTQGAKDSLETSRIQNTSSQGRPRESTAQAKATQFNSALFTLSSHRQGPSASPSCHWDSTRMSVEPVSSEIYNAESRNKDDGKVHLKWKMEVKEMAKKAATGQLTVPPWHPQSSLTLESEAENEPDALLQPPIRSPENTDWQRVIEYHRENDEPRGNGKFDKTGNNDCDSDQHGRQPRLGSFTSIRHPSPRQKEQPEHSEAFQASSDTLVAVEKSYSHQSMQSTCSPESSEDITDEFLTPDDEYFYSSTAQENLALETSSPIEEDFEGIQGAFAQPQVSGEEKFQMRKILGKNAEILPRSQFQPVRSTEDEQEETSKESPKELKEKDISLTDIQDLSSISYEPDSSFKEASCKTPKINHAPTSVSTPLSPGSVSSAASQYKDCLESITFQVKTEFASCWNSQEFIQTLSDDFISVRERAKKLDSLLTSSETPPSRLTGLKRLSSFIGAGSPSLVKACDSSPPHATQRRSLPKVEAFSQHHIDELPPPSQELLDDIELLKQQQGSSTVLHENTASDGGGTANDQRHLEEQETDSKKEDSSMLLSKETEDLGEDTERAHSTLDEDLERWLQPPEESVELQDLPKGSERETNIKD

SEQ ID NO: 3788 - protein, 969 aa, Homo sapiens [sequence omitted]

SEQ ID NO: 3789 - protein, 1488 aa, Homo sapiens
MVKGSVENYRLIHNWVMAQHMQSHAPYKWDYWPHEDVRAECRFVGLTNLGATCYLASTIQQLYMIPEARQAVFTAKYSEDMKHKTTLLELQKMFTYLMESECKAYNPRPFCKTYTMDKQPLNTGEQKDMTEFFTDLITKIEEMSPELKNTVKSLFGGVITNNVVSLDCEHVSQTAEEFYTVRCQVADMKNIYESLDEVTIKDTLEGDNMYTCSHCGKKVRAEKRACFKKLPRILSFNTMRYTFNMVTMMKEKVNTHFSFPLRLDMTPYTEDFLMGKSERKEGFKEVSDHSKDSESYEYDLIGVTVHTGTADGGHYYSFIRDIVNPHAYKNNKWYLFNDAEVKPFDSAQLASECFGGEMTTKTYDSVTDKFMDFSFEKTHSAYMLFYKRMEPEEENGREYKFDVSSELLEWIWHDNMQFLQDKNIFEHTYFGFMWQLCSCIPSTLPDPKAVSLMTAKLSTSFVLETFIHSKEKPTMLQWIELLTKQFNNSQAACEWFLDRMADDDWWPMQILIKCPNQIVRQMFQRLCIHVIQRLRPVHAHLYLQPGMEDGSDDMDTSVEDIGGRSCVTRFVRTLLLIMEHGVKPHSKHLTEYFAFLYEFAKMGEEESQFLLSLQAISTMVHFYMGTKGPENPQVEVLSEEEGEEEEEEEDILSLAEEKYRPAALEKMIALVALLVEQSRSERHLTLSQTDMAALTGGKGFPFLFQHIRDGINIRQTCNLIFSLCRYNNRLAEHIVSMLFTSIAKLTPEAANPFFKLLTMLMEFAGGPPGMPPFASYILQRIWEVIEYNPSQCLDWLAVQTPRNKLAHSWVLQNMENWVERFLLAHNYPRVRTSAAYLLVSLIPSNSFRQMFRSTRSLHIPTRDLPLSPDTTVVLHQVYNVLLGLLSRAKLYVDAAVHGTTKLVPYFSFMTYCLISKTEKLMFSTYFMDLWNLFQPKLSEPAIATNHNKQALLSFWYNVCADCPENIRLIVQNPVVTKNIAFNYILADHDDQDVVLFNRGMLPAYYGILRLCCEQSPAFTRQLASHQNIQWAFKNLTPHASQYPGAVEELFNLMQLFIAQRPDMREEELEDIKQFKKTTISCYLRCLDGRSCWTTLISAFRILLESDEDRLLVVFNRGLILMTESFNTLHMMYHEATACHVTGDLVELLSIFLSVLKSTRPYLQRKDVKQALIQWQERIEFAHKLLTLLNSYSPPELRNACIDVLKELVLLSPHDFLHTLVPFLQHNHCTYHHSNIPMSLGPYFPCRENIKLIGGKSNIRPPRPELNMCLLPTMVETSKGKDDVYDRMLLDYFFSYHQFIHLLCRVAINCEKFTETLVKLSVLVAYEGLPLHLALFPKLWTELCQTQSAMSKNCIKLLCEDPVFAEYIKCILMDERTFLNNNIVYTFMTHFLLKVQSQVFSEANCANLISTLITNLISQYQNLQSDFSNRVEISKASASLNGDLRALALLLSVHTPKQLNPALIPTLQELLSKCRTCLQQRNSLQEQEA

SEQ ID NO: 3790 - protein, 190 aa, Homo sapiens
MNEFFSVDDNNEEEEDVEMKEDSDENGPEEKQSVEEMEEQSQDADGVNTVTVPGPASEEAVEDCKDEDFAKDENITKGGEVTDHSVRDQDHPDGQENDSTKNEIKIETESQSSYMETEELSSNQEDAVIVEQPEVIPLTEDQEEKEGEKAPGEDTPRMPGKSEGSSDLENTPGPDAGAQDEAKEQRNGTK

SEQ ID NO: 3791 - protein, 103 aa, Homo sapiens [sequence omitted]

SEQ ID NO: 3792 - protein, 564 aa, Homo sapiens
MPNRTRRPGTQMVRTFCPPPLPKPSSTTPTPLVSETGGNSPSDKVDNELKNLEHLSSFSSDEDDPGYSQDAYKSVSTPLTTLDATSDKKKKTEALQVATTSPTANTTGTATTSSTTVGAVKQEPLHSTSYAVNILENISSSESSKPIELDGLPSDQFAKGQDTVAIEGFTDEEDTESGGEGQYRERDEFVVKIEDIETFKEALKTGKEPPAIWKVQKALLQKFVPEIRDGQREFAATNSYLGYFGDAKSKYKRIYVKFIENANKKEYVRVCSKKPRNKPSQTIRTVQAKPSSSSKTSDPLASKTTTTKAPSVKPKVKQPKVKAEPPPKKRKKWKEEFSSSQSDSSPEIHTSSSDDEEFEPPAPFVTRFLNTRAMKETFKSYMELLVSIALDPDTMQALEKSNDELLLPHMKKIDGMLNDNRKRLLLNLHLDQSFKNALESFPELTIITRDSKAKSGGTAISKIKMNGKAYNKKTLRTSKTTTKSAQEFAVDPEKIQLYSLYHSLHHYKYHVYLICKDEISSVQKKNEDLGQEEIVQLCMKNVKWVEDLFEKFGELLNHVQQKCS

SEQ ID NO: 3793 - protein, 127 aa, Homo sapiens
MRELRHRARPSGFNRWMGAASQSPLSSASPSPGHTPAPTTSPTGYRAEDPPAGRAAQRPQHTHPTLQGLTLPAQLNATSSLKLSPSPPPTRAASGPRTVPGGAPRQDQTYPSSKSPSLLTAQMLPGH

SEQ ID NO: 3794 - protein, 711 aa, Homo sapiens
MSSVQSQQEQLSQSDPSPSPNSCSSFELIDMDAGSLYEPVSPHWFYCKIIDSKETWIPFNSEDSQQLEEAYSSGKGCNGRVVPTDGGRYDVHLGERMRYAVYWDELASEVRRCTWFYKGDKDNKYVPYSESFSQVLEETYMLAVTLDEWKKKLESPNREIIILHNPKLMVHYQPVAGSDDWGSTPTEQGRPRTVKRGVENISVDIHCGEPLQIDHLVFVVHGIGPACDLRFRSIVQCVNDFRSVSLNLLQTHFKKAQENQQIGRVEFLPVNWHSPLHSTGVDVDLQRITLPSINRLRHFTNDTILDVFFYNSPTYCQTIVDTVASEMNRIYTLFLQRNPDFKGGVSIAGHSLGSLILFDILTNQKDSLGDIDSEKDSLNIVMDQGDTPTLEEDLKKLQLSEFFDIFEKEKVDKEALALCTDRDLQEIGIPLGPRKKILNYFSTRKNSMGIKRPAPQPASGANIPKESEFCSSSNTRNGDYLDVGIGQVSVKYPRLIYKPEIFFAFGSPIGMFLTVRGLKRIDPNYRFPTCKGFFNIYHPFDPVAYRIEPMVVPGVEFEPMLIPHHKGRKRMHLELREGLTRMSMDLKNNLLGSLRMAWKSFTRAPYPALQASETPEETEAEPESTSEKPSDVNTEETSVAVKEEVLPINVGMLNGGQRIDYVLQEKPIESFNEYLFALQSHLCYWESEDTVLLVLKEIYQTQGIFLDQPLQ

SEQ ID NO: 3795 - protein, 152 aa, Homo sapiens [sequence omitted]

SEQ ID NO: 3796 - protein, 890 aa, Homo sapiens
MDFGTVRETLDAGNYDSPLEFCKDIRLIFSNAKAYTPNKRSKIYSMTLRLSALFEEKMKKISSDFKIGQKFNEKLRRSQRFKQRQNCKGDSQPNKSIRNLKPKRLKSQTKIIPELVGSPTQSTSSRTAYLGTHKTSAGISSGVTSGDSSDSAESSERRKRNRPITNGSTLSESEVEDSLATSLSSSASSSSEESKESSRARESSSRSGLSRSSNLRVTRTRAAQRKTGPVSLANGCGRKATRKRVYLSDSDNNSLETGEILKARAGNNRKVLRKCAAVAANKIKLMSDVEENSSSESVCSGRKLPHRNASAVARKKLLHNSEDEQSLKSEIEEEELKDENQLLPVSSSHTAQSNVDESENRDSESESDLRVARKNWHANGYKSHTPAPSKTKFLKIESSEEDSKSHDSDHACNRTAGPSTSVQKLKAESISEEADSEPGRSGGRKYNTFHKNASFFKKTKILSDSEDSESEEQDREDGKCHKMEMNPISGNLNCDPIAMSQCSSDHGCETDLDSDDDKIEKPNNFMKDSASQDNGLSRKISRKRVCSSDSDSSLQVVKKSSKARTGLLRITRRCAATAANKIKLMSDVEDVSLENVHTRSKNGRKKPLHLACTTAKKKLSDCEGSVHCEVPSEQYACEGKPPDPDSEGSTKVLSQALNGDSDSEDMLNSEHKHRHTNIHKIDAPSKRKSSSVTSSGEDSKSHIPGSETDRTFSSESTLAQKATAENNFEVELNYGLRRWNGRRLRTYGKAPFSKTKVIHDSQETAEKEVKRKRSHPELENVKISETTGNSKFRPDTSSKSSDLGSVTESDIDCTDNTKTKRRKTKGKAKVVRKEFVPRDREPNTKVRTCMHNQKDAVQMPSETLKAKMVPEKVPRRCATVAANKIKIMSN

SEQ ID NO: 3797 - protein, 874 aa, Homo sapiens
MPQMKSDKREWAFVKTARHNWYSRRFFFLSNDELLEILSETKDPLRVQPHLKKCFEGIAKLEFTDNLGIVGMISSEKETVPFIQKIYPANAKGMVEKWLQQVEQMMLASMREVIGLGIEAYVKVPRNHWVLQWPGQVVICVSSIFWTQEVSQALAENTLLDFLKKSNDQIAQIVQLVRGKLSSGARLTLGALTVIDVHARDVVAKLSEDRVSDLNDFQWISQLRYYWVAKDVQVQIITTEALYGYEYLGNSPRLVITPLTDRCYRTLMGALKLNLGGAPEGPAGTGKTETTKDLAKALAKQCVVFNCSDGLDYKAMGKFFKGLAQAGAWACFDEFNRIEVEVLSVVAQQILSIQQAIIRKLKTFIFEGTELSLNPTCAVFITMNPGYAGRAELPDNLKALFRTVAMMVPDYALIGEMSLYSTGFLDSRSLAQKIVATYRLCSEQLSSQHHYDYGMRAVNSVLTAAGNLKLKYPEENESVLLLRALLDVNLAKFLAQDVPLFQGIISDLFPGVVLPKPDYEVFLKVLNDNIKKMKLQPVPWFIGKIIQIYEMMLVRHGYMIVGDPMGGKTSAYKVLAAALGDLHAANQMEEFAVEYKIINPKAITMGQLYGCFDQVSHEWMDGVLANAFREQASSLSDDRKWIIFDGPVDAIWIENMNTVLDDNKKLCLMSGEIIQMNSKMSLIFEPADLEQASPATVSRCGMIYMEPHQLGWKPLKDSYMDTLPSSLTKEHKELVNDMFMWLVQPCLEFGRLHCKFVVQTSPIHLAFSMMRLYSSLLDEIRAVEEEEMELGEGLSSQQIFLWLQGLFLFSLVWTVAGTINADSRKKFDVFFRNLIMGMDDNHPRPKSVKLTKNNIFPERGSIYDFYFIKQASGH

SEQ ID NO: 3798 - protein, 184 aa, Homo sapiens
MESIYLQKHLGACLTQGLAEVARVRPVDPIEYLALWIYKYKENVTMEQLRQKEMAKLERERELALMEQEMMERLKAEELLLQQQQLALQLELEMQEKERQRIQELQRAQEQLGKEMRMNMENLVRNEDILHSEEATLDSGKTLAEISDRYGAPNLSRVEELDEPMFSDVSISVFCEKTRFCFCF

SEQ ID NO: 3799 - protein, 127 aa, Homo sapiens
MVMGYSAGALHWSGMVCQCRSYGVGPQSPQDCSASRCGLAGAPGEASRARGPQVGLALFDGQDHPAEFRSDDSPRAKVSCGSKLSLVGMAVPGHSPLQTLLRPTLWAPHQLACHPYHFSKQLSLTTR

SEQ ID NO: 3800 - protein, 156 aa, Homo sapiens
MSVPTSTLDSQSPPTAHTAKCTALCSLMPHGSREHSVEIPKDQLASPTEPRPWEQQCYHGNGQSYRGTYFTTVTGRTCQAWSSMTPHQHSRTPEKYPNAYVFVLYHKRRKGQLKFLLEESCFELTAQDSTCVRCKGHSKMSQEHCLGAKSLREEKY

SEQ ID NO: 3801 - protein, 461 aa, Homo sapiens
MGVSGPLVLVLSTEFRHLYLPKYEQTTYTCAHVARETSALKLRPRVHLACVLSVHTPTKHPGATPGASAIGGCPFPEAQAPPSPSRILRFPWQLVQEQVRQTMAEALKVWSDVTPLTFTEVHEGRADIMIDFARYWHGDDLPFDGPGGILAHAFFPKTHREGDVHFDYDETWTIGDDQGTDLLQVAAHEFGHVLGLQHTTAAKALMSAFYTFRYPLSLSPDDCRGVQHLYGQPWPTVTSRTPALGPQAGIDTNEIAPLEPDAPPDACEASFDAVSTIRGELFFFKAGFVWRLRGGQLQPGYPALASRHWQGLPSPVDAAFEDAQGHIWFFQGAQYWVYDGEKPVLGPAPLTELGLVRFPVHAALVWGPEKNKIYFFRGRDYWRFHPSTRRVDSPVPRRATDWRGVPSEIDAAFQDADGYAYFLRGRLYWKFDPVKVKALEGFPRLVGPDFFGCAEPANTFL

SEQ ID NO: 3802 - protein, 628 aa, Homo sapiens
MAARQQQQIENQQQMLVAKEQRLHFLKQQERRQQQSISENEKLQKLKERVEAQENKLKKIRAMRGQVDYSKIMNGNLSAEIERFSAMFQEKKQEVQTAILRVDQLSQQLEDLKKGKLNGFQSYNGKLTGPAAVELKRLYQELQIRNQLNQEQNSKLQQQKELLNKRNMEVAMMDKRISELRERLYGKKIQLNRVNGTSSPQSPLSTSGRVAAVGPYIQVPSAGSFPVLGDPIKPQSLSIASNAAHGRSKSANDGNWPTLKQNSSSSVKPVQVAGADWKDPSVEGSVKQGTVSSQPVPFSALGPTEKPGIEIGKVPPPIPGVGKQLPPSYGTYPSPTPLGPGSTSSLERRKEGSLPRPSAGLPSRQRPTLLPATGSTPQPGSSQQIQQRISVPPSPTYPPAGPPAFPAGDSKPELPLTVAIRPFLADKGSRPQSPRKGPQTVNSSSIYSMYLQQATPPKNYQPAAHSALNKSVKAVYGKPVLPSGSTSPSPLPFLHGSLSTGTPQPQPPSESTEKEPEQDGPAAPAGPTSRSCCTSASTLSPTKLTPIVHSPLRYQSDADLEALRRKLANAPRPLKKRSSITEPEGPFLPAQPLPGLHGHLGRCGQWKHQCQWKPGRAPPCPAHSPTPR

SEQ ID NO: 3803 - protein, 167 aa, Homo sapiens
MPMKPPRCTRTSRSSCSRTTLRPAASPNTTSSRGLTVHPPCSSKLRMDPTPAWPASCEALMGPSSSAGPARLRLPPRRHSSLPPRRASFLIVSRASKSWECAGPVPALPGGVVAVPTSQQDPQCRGSQVAHRRCLSRAILQSGPQCQSCLSIWVTSARSRVQASSRS

SEQ ID NO: 3804 - protein, 344 aa, Homo sapiens
MEPLEIPVETITSEVIEKCTTPLSDDHDEKYGVPSLEELGFDTDGLSSAVWPGGETEALTRLERHLERKAWVANFERPRMNANSLLASPTGLSPYLRFGCLSCRLFYFKLTDLYKKVKKNSSPPLSLYGQLLWREFFYTAATNNPRFDKMEGNPICVQIPWDKNPEALAKWAEGRTGFPWIDAIMTQLRQEGWIHHLARHAVACFLTRGDLWISWEEGMKVFEELLLDADWSINAGSWMWLSCSSFFQQFFHCYCPVGFGRRTDPNGDYIRRYLPVLRGFPAKYIYDPWNAPEGIQKVAKCLIGVNYPKPMVNHAEASRLNIERMKQIYQQLSRYRGLENFFVL

SEQ ID NO: 3805 - protein, 485 aa, Homo sapiens
MDNECVAQTWFRFLHMLSNPVDLSNPAIISSTPKFQEQFLNVSGMPQELNQYPCLKHLPQIFFRAMRGISCLVDAFLGISRPRSDSAPPTPVNRLSMPQSAAVSTTPPHNRRHRAVTVNKATMKTSTVSTAHASKVQHQTSSTSPLSSPNQTSSEPRPLPAPRRPKVNSILNLFGSWLFDAAFVHCKLHNGINRDSSMTAITTQASMEFRRKGSQMSTDTMVSNPMFDASEFPDNYEAGRAEACGTLCRIFCSKKTGEEILPAYLSRFYMLLIQGLQINDYVCHPVLASVILNSPPLFCCDLKGIDVVVPYFISALETILPDRELSKFKSYVNPTELRRSSINILLSLLPLPHHFGTVKSEVVLEGKFSNDDSSSHDKPITFLSLKLRLVNILIGALQTETDPNNTQMILGAMLNIVQDSALLEAIGCQMEMGGGENNLKSHSRTNSGISSASGGSTEPTTPDSERPAQALLRVMLLIQIQLLGS

SEQ ID NO: 3806 - protein, 142 aa, Homo sapiens
MFACAKLACTPSLIRAGSRVAYRPISASVLSQPEASRTGEGSAVFNGAQNGVSQLIQRGFQTSAISRDIDTAAKFIGAGAATVGVAGSGAGIGTVFGSLIIGYARNPSLKQQLFSYAILGFALSEAMGLFCLMVAFLILFAM

SEQ ID NO: 3807 - protein, 102 aa, Homo sapiens [sequence omitted]

SEQ ID NO: 3808 - protein, 101 aa, Homo sapiens [sequence omitted]

SEQ ID NO: 3809 - protein, 131 aa, Homo sapiens
MREFSLIELWLMPKVFNHYVWGSFLVQRKKKQPKSVLVYHCTSGNLNPCNRGKMGFQVLATFEIPIPFERALTRPYADFTTSNFRTQYWNAISQQAPAIIYDFYLWLTGRKPSYRRKIPSSTQFYKWRNRS

SEQ ID NO: 3810 - protein, 140 aa, Homo sapiens [sequence omitted]

SEQ ID NO: 3811 - protein, 157 aa, Homo sapiens
MKLKCIFGFATKETSCYNVTNIGFKSPSDFWQSVHSTLPRELAPCLVFNTSPNLALFSAAFAFIVVKDSAGDSDVVVQELKSMVATKIAKYAVPDEILVVKRLPKTRSGKVMRRLLRKIITSEAQELGDTTTLEDPSIIAEILSVYQKCKDKQAAAK

SEQ ID NO: 3812 - protein, 1591 aa, Homo sapiens
MVQGRVTEVKFPLEHYILELQDHRVALNGSHSEKVAILDDKTAMVTASQLGQTNLVFVHKNVHMRSVSGLPNCTIYVVEPGFLGFTVQPGNRWSLEVGQVYVITVDVFDKSSTKVYISDNLRITYDFPKEYFEEQLTTVNGSYHIVKALKDGVVVINASLTSIIYQNKDIQPIKFLIKHQQEVKIYFPIMLTPKFLAFPHHPMGMLYRYKVQVEGGSGNFTWTSSNETVVIVTTKGVVTAGQVRGNSTVLARDVQNPFRYGEIKIHVLKLNKMELLPFHADVEIGQIIEIPIAMYHINKETKEAMAFTDCSHLSLDLNMDKQGVFTLLKEGIQRPGPMHCSSTHIAAKSLGHTLVTVSVNECDKYLESSATFAAYEPLKALNPVEVALVTWQSVKEMVFEGGPRPWILEPSRFFLELNAEKTEKIGIAQVWLPSKRKQNQYIYRIQCLDLGEQVLTFRIGNHPGVLNPSPAVEVLQVRFICAHPASMSVTPVYKVPAGAQPCPLPQHNKWLIPVSRLRDTVLELAVFDQHRRKFDNFSSLMLEWKSSNETLAHFEDYKSVEMVAKDGGSGQTRLHGHQILKVHQIKGTVLIGVNFVGYSEKKSPKEISNLPRSVDVELLLVDDVTVVPENATIYNHPDVKETFSLVEGSGYFLVNSSEQGVVTITYMEAESSVELVPLHPGFFTLEVYDLCLAFLGPATAHLRVSDIQELELDLIDKVEIDKTVLVTVRVLGSSKRPFQNKYFRNMELKLQLASAIVTLTPMEQQDEYSENYILRATTIGQTTLVAIAKDKMGRKYTSTPRHIEVFPPFRLLPEKMTLIPMNMMQVMSEGGPQPQSIVHFSISNQTVAVVNRRGQVTGKIVGTAVVHGTIQTVNEDTGKVIVFSQDEVQIEVVQLRAVRILAAATRLITATKMPVYVMGVTSTQTPFSFSNANPGLTFHWSMSKRDVLDLVPRHSEVFLQLPVEHNFAMVVHTKAAGRTSIKVTVHCMNSSSGQFEGNLLELSDEVQILVFEKLQLFYPECQPEQILMPINSQLKLHTNREGAAFVSSRVLKCFPNSSVIEEDGEGLLKAGSIAGTAVLEVTSIEPFGVNQTTITGVQVAPVTYLRVSSQPKLYTAQGRTLSAFPLGMSLTFTVQFYNSIGEKFHTHNTQLYLALNRDDLLHIGPGNKNYTYMAQAVNRGLTLVGLWDRRHPGMADYIPVAVEHAIEPDTKLTFVGDIICFSTHLVSQHGEPGIWMISANNILQTDIVTGVGVARSPGTAMIFHDIPGVVKTYREVVVNASSRLMLSYDLKTYLTNTLNSTVFKLFITTGRNGVNLKGFCTPNQALAITKVLLPATLMLCHVQFSNTLLDIPASKVFQVHSDFSMEKGVYVCIIKVRPQSEELLQALSVADTSVYGWATLVSERSKNGMQRILIPFIPAFYINQSELVLSHKQDIGEIRVLGVDRVLRKLEVISSSPVLVVAGHSHSPLTPGLAIYSVRVVNFTSFQQMASPVFINISCVLTSQSEAVVVRAMKDKLGADHCEDSAILKRFTGSYQILLLTLFAVLASTASIFLAYSAFLNKIQTVPVVYVPTLGTPQPGFLTPQVLPLTS

SEQ ID NO: 3813 - protein, 623 aa, Homo sapiens
MSDLRVQLNFSAMASELEEVKRCMERKDKEKAHLASQVENLTRELENGEKQQLQMLDRLKEIQNHFDTCEAERKHADLQISELTRHAEDATKQAERYLSELQQSEALKEEAEKRREDLKLKAQESIRQWKLKHKKLERALEKQSETVDELTGKNNQILKEKDELKTQLYAALQQIENLRKELNDVLTKRALQEEELHSKEEKLRDIKSHQADLELEVKNSLDTIHRLESELKKQSKIQSQMKVEKAHLEEEIAELKKSQAQDKAKLLEMQESIKDLSAIRADLANKLAEEERAKKAVLKDLSDLTAQAKSRDEETATIITQLKLERDVHQRELKDLTSSLQSVKTKHEQNIQELMKHFKKEKSEAENHIRTLKAESLEEKNMAKIHRGQLEKLKSQCDRLTEELTQNENENKKLKLKYQCLKDQLEEREKHISIEEEHLRRMEEARLQLKDQLLCLETEQESILGVIGKEIDAACKTFSKDSVEKLKVFSSGPDIHYDPHRWLAESKTKLQWLCEELKERENREKNLRHQLMLCRQQLRNLTENKESELQCLFQQIERQEQLLDEIHREKRDLLEETQRKDEEMGSLQDRVIALETSTQVALDHLESVPEKLSLLEDFKDFRR

SEQ ID NO: 3814 - protein, 155 aa, Homo sapiens [sequence omitted]

SEQ ID NO: 3815 - protein, 577 aa, Homo sapiens
MRWGMPPQDAFTTQWLVRDLRGKTEKEFKAYVSLFMRHLCEPGADGSETFADGVPREGLSRQQVLTRIGVMSLVKKKVQEFEHINGRWSMPELMPDPSADSKRSSRASSPTKTSPTTPEASATNSPCTSKPATPAPSEKGEGIRTPLEKEEAENQEEKPEKNSRIGEKMETEADAPSPAPSLGERLEPRKIPLEDEVPGVPGEMEPEPGYRGDREKSATESTPGERGEEKPLDGQEHRERPEGETGDLGKRAEDVKGDRELRPGPRDEPRSNGRREEKTEKPRFMFNIADGGFTELHTLWQNEERAAISSGKLNEIWHRRHDYWLLAGIVLHGYARWQDIQNDAQFAIINEPFKTEANKGNFLEMKNKFLARRFKLLEQALVIEEQLRRAAYLNLSQEPAHPAMALHARFAEAECLAESHQHLSKESLAGNKPANAVLHKVLNQLEELLSDMKADVTRLPATLSRIPPIAARLQMSERSILSRLASKGTEPHPTPAYPPGPYATPPGYGAAFSAAPVGALAAAGANYSQMPAGSFITAATNGPPVLVKKEKEMVGALVSDGLDRKEPRAGEVICIDD

SEQ ID NO: 3816 - protein, 143 aa, Homo sapiens
MTSAKTLRGRHSSTKTLFPSEVPFTGTGVRTSPCLLGAIPFNLQQPLVSVHNANEVRVASPQANNFPQIAARCGPAKSQGAAISKQSPPVLEGVCRDASGERPGPGAGLQLWDKLLSGPGATQRRQAAVQVKPIQHLAPCLQA

SEQ ID NO: 3817 - protein, 123 aa, Homo sapiens
MKYFAPSRGPQLSLQVLLWRLNLPPVSRSSQLSLLSFLGRWNFLRPRRPPTLPPESSIESVAQTPLNHEVTVQTQGEDQAHYTLPSITVKPADVEISITSEPTTDTDSSPAQQAAPNQHPEQV

SEQ ID NO: 3818 - protein, 113 aa, Homo sapiens [sequence omitted]

SEQ ID NO: 3819 - protein, 119 aa, Homo sapiens [sequence omitted]

SEQ ID NO: 3820 - protein, 358 aa, Homo sapiens
MNTANSLCLGGTPASASSSSSRAAPLVTSGKAPPNLPQGVPPLLHNQYLVGPGGLLPAYPIYGYDELQMLQSRLPVDYYGIPFAAPTALASRDGSLANNPYPGDVTKFGRGDSASPAPATTPAQPQQSQSQTHHTAQQPFVNPALPPGYSYTGLPYYTGMPSAFQYGPTMFVPPASAKQHGVNLSTPTPPFQQASGYGQHGYSTGYDDLTQGTAAGDYSKGGYAGSSQAPNKSAGSGPGKGVSVSSSTTGLPDMTGSVYNKTQTFDKQGFHAGTPPPFSLPSVLGSTGPLASGAAPGYAPPPFLHILPAHQQPHSQLLHHHLPQDAQSGSGQRSQPSSLQPKSQASKPAYGNSPYWTN

SEQ ID NO: 3821 - protein, 1255 aa, Homo sapiens [sequence omitted]

SEQ ID NO: 3822 - protein, 166 aa, Homo sapiens [sequence omitted]

SEQ ID NO: 3823 - protein, 679 aa, Homo sapiens
MLSMENVGNYQGYSQETAPKDHLLHDPETSSDEDLRSNSERDLETHMMHLSGNDSGVRLGQKQLENALTVRLSKKFEKINEGRMPGTVHSSWHSVKQTMSLPEKSQSQIKHQNLVALVSEDHCVDTSQEISFLGSNKQKMLEAHIKTFRMRMLWGLPCKVLESIEIFKSEEDISNSFSHFYLPSSASFISQGDSKDGVSKSCRRSTFQGEKLGTTSSVPVLNHPQPVSSPIGKEGQGTLRRQFSDIDHDLIETDAKDGASTPLRRGTTYFQGEKLETTSSFSILGHPHLVTSPVDQEKQGTLRREFADTDEDLTESVWTTEDGRQTFLPPTYSIIDEVSQKQTILASRCSAELPILQAGVGRDSRDKRESASNNVNRLQGSGKTFPVTNGSKEMFKEEEICTLQSQTRNNLTTSKSGSCLVTNVKRSTSHETEIFPPRISVPQTPKSSYLKNQMLSQLKLVQRKHSQPQSHFTGMSLALDNLSSKDLLTHAQGISNQDLGTSQVLHVHLEVRGIRVAQQQEHRVPTHVLQKCQVKNFSPAAKRVSPLRPNGGELGGGDAGLGTSQLTRKSLPVHNKASGEVPGSKSSPTLKTQPPSENLFRKWMQTLLQWFNKPSIMCEEQESSWEKGSSLSSSVQNRSRVTSRAAFTGATEAQKIRKDTGEFLEEKLGHSHGIDITCP

SEQ ID NO: 3824 - protein, 163 aa, Homo sapiens
MTTKTMSQYCQQLNGLKAENTRLNSKLEKEEHHTDGLEAEVEFFHSRLAAAINEHNESLETKDLELVLQRAHNFSVHKKISSTVSQLKDKNELLTEQFSKAQMKFNTLKGKLHEIRDALREKTLALESVQMDQRQAQHRIKEMEQIHPNEETKGVDPPESTTV

SEQ ID NO: 3825 - protein, 152 aa, Homo sapiens [sequence omitted]

SEQ ID NO: 3826 - protein, 118 aa, Homo sapiens [sequence omitted]

SEQ ID NO: 3827 - protein, 151 aa, Homo sapiens
MDGVDARVSRRRGWHPHEASHTPMGVGIWRHAWGGDALWRHKAGASRAPRSWTGPQGVLQLKREGKKAHEPVASGADFPTQGLSLCPWGPRNFPGNLHLAQIYPLSPPTLAVASQEAPATVLKTKFSSVIPLCSACVIHETGKSPGLQRKK

SEQ ID NO: 3828 - protein, 131 aa, Homo sapiens [sequence omitted]

SEQ ID NO: 3829 - protein, 232 aa, Homo sapiens
MANYYEVLGVQASASPEDIKKAYRKLALRWHPDKNPDNKEEAEKKFKLVSEAYEVLSDSKKRSLYDRAGCDSWRAGGGASTPYHSPFDTGYTFRNPEDIFREFFGGLDPFSFEFWDSPFNSDRGGRGHGLRGAFSAGFGEFPAFMEAFSSFNMLGCSGGSHTTFSSTSFGGSSSGSSGFKSVMSSTEMINGHKVTTKRIVENGQERVEVEEDGQLKSVTVNGKEQLKWMDSK

SEQ ID NO: 3830 - protein, 119 aa, Homo sapiens
MSIHRICRHPSKESCTAYSTDILTKASPSCLGGVGLFPYILSSLETRQVNQLGVKWPSAMSSPGESIPLLPLFPCNWNWTTWCPRLSGVKLPLGVSCSSVTFIFAFLMSPLAVLILLLQ

SEQ ID NO: 3831 - protein, 254 aa, Homo sapiens
MGEDFMTKTPKAMATKAKIDKWHLIKLKSFCTAKETTIRMNRQPTEWEKIFAIYPSDKGLISRICKELKQIYKIKSNNSINKWAKDMNRHFSKEDIYAAKRHMKECSSSLAIREMQIKTTVRYYLTPVRMAIIKKSGNNRCWKGYGEIGTLLHCWWDCKLVQPLWKTVWRFLKDLELEIPFDPAIPLLGIYPKDYKSCCYKDTCTRKFILALLTIAKTWNQPKCPSMIDWIKKMWHMYTIEYYAAIKRMSSCPL

SEQ ID NO: 3832 - protein, 1014 aa, Homo sapiens [sequence omitted]

SEQ ID NO: 3833 - protein, 161 aa, Homo sapiens [sequence omitted]

SEQ ID NO: 3834 - protein, 275 aa, Homo sapiens
MLVAQQAYSTLVPMPLLVSSISEIQNQVLEEIQNLNCVKENSATFIERKLSFEKKKPVQILPEMPHQTDIHRSKLLSTYSAEELYQAKRKCNATQEYDINLLEGDLVAVIEQKDPLGSTSRWLVDTGNVKGYVYSSFLKPYNPAKMQKVDAENRFCDDDFENISLFVSSRPASDSVTGTSESSIGDSSSSLSGTCGKFETNGTDVDSFQEVDEQIFYAVHAFQARSDHELSLQEYQRVHILRFCDLSGNKEWWLAEAQGQKGYVPANYLGKMTYA

SEQ ID NO: 3835 - protein, 1551 aa, Homo sapiens
MSPIGDAFRNRLRMFPSLINCCTIDWFQSWPTDALELVANKFLEDVELDDNIRVEVVSMCKYFQESVKKLSLDYYNKLRRHNYVTPTSYLELILTFKTLLNSKRQEVAMMRDRYLTGLQKLDFAASQVAVMQRELTALQPQLILTSEETAKMMVKIEAETREADGKKLLVQADEKEANVAAAIAQGIKNECEGDLAEAMPALEAALAALDTLNPADISLVKSMQNPPGPVKLVMESICIMKGMKPERKPDPSGSGKMIEDYWGVSKKILGDLKFLESLKTYDKDNIPPLTMKRIRERFINHPEFQPAVIKNVSSACEGLCKWVRAMEVYDRVAKVVAPKRERLREAEGKLAAQMQKLNQKRAELKLVVDRLQALNDDFEEMNTKKKDLEENIEICSQKLVRAEKLISGLGGEKDRWTEAARQLGIRYTNLTGDVLLSSGTVAYLGAFTVDYRVQCQNQWLAECKDKVIPGFSDFSLSHTLGDPIKIRAWQIAGLPVDSFSIDNGIIVSNSRRWALMIDPHGQANKWIKNMEKANKLAVIKFSDSNYMRMLENALQLGTPVLIENIGEELDASIEPILLKATFKQQGVEYMRLGENIIEYSRDFKLYITTRLRNPHYLPEVAVKVCLLNFMITPLGLQDQLLGIVAAKEKPELEEKKNQLIVESAKNKKHLKEIEDKILEVLSMSKGNILEDETAIKVLSSSKVLSEEISEKQKVASMTETQIDETRMGYKPVAVHSATIFFCISDLANIEPMYQYSLTWFINLYMHSLTHSTKSEELNLRIKYIIDHFTLSIYNNVCRSLFEKDKLLFSLLLTIGIMKQKKEITEEVWYFLLTGGIALDNPYPNPAPQWLSEKAWAEIVRASALPKLHGLMEHLEQNLGEWKLIYDSAWPHEEQLPGSWKFSQGLEKMVILRCLRPDKMVPAVREFIAEHMGKLYIEAPTFDLQGSYNDSSCCAPLIFVLSPSADPMAGLLKFADDLGMGGTRTQTIFLGQGQGPIAAKMINNAIKDGTWVVLQNCHLAASWMPTLEKICEEVIVPESTNARFRLWLTSYPSEKFPVSILQNGIKMTNEPPKGLRANLLRSYLNDPISDPVFFQSCAKAVMWQKMLFGLCFFHAVVQERRNFGPLGWNIPYEFNESDLRTSMWQIQMFLNDYKEVPFDALTYLTGECNYGGRVTDDKDRRLLLSLLSMFYCKEIEEDYYSLAPGDTYYIPPHGSYQSYIDYLRNLPITAHPEVFGLHENADITKDNQETNQLFEGVLLTLPRQSGGSGKSPQEVVEELAQDILSKLPRDFDLEEVMKLYPVVYEESMNTVLRQELIRFNRLTKVVRRSLINLGRAIKGQVLMSSELEEVFNSMLVGKVPAMWAAKSYPSLKPLGGYVADLLARLTFFQEWIDKGPPVVFWISGFYFTQSFLTGVSQNYARKYTIPIDHIGFEFEVTPQETVMENNPEDGAYIKGLFLEGARWDRKTMQIGESLPKILYDPLPIIWLKPGESAMFLHQDIYVCPVYKTSARRGTLSTTGHSTNYVLSIELPTDMPQKHWINRGVASLCQLDN

SEQ ID NO: 3836 - protein, 416 aa, Homo sapiens
MQGAPRARFGSRTPPAAAASSSSPSCTPATSQGHLRTPAQPPPASPAASSSSSFAAVVRYGPGAAAAAGTGGTGSDSASLELSAESRMILDAFAQQCSRVLSLLNCGGKLLDSNHSQSMISCVKQEGSSYNERQEHCHIGKGVHSQTSDNVDIEMQYMQRKQQTSAFLRVFTDSLQNYLLSGSFPTPNPSSASEYGHLADVDPLSTSPVHTLGGWTSPATSESHGHPSSSTLPEEEEEEDEEGYCPRCQELEQEVISLQQENEELRRKLESIPVPCQTVLDYLKMVLQHHNQLLIPQPADQPTEGSKQLLNNYPVYITSKQWDEAVNSSKKDGRRLLRYLIRFVFTTDELKYSCGLGKRKRSVQSGETGPERRPLDPVKVTCLRGTASFRSVSPSVISFHRIGCGSPRTSVQPSVF

SEQ ID NO: 3837 - protein, 189 aa, Homo sapiens
MRNQAVNVACRFHVDVSFQISGFNICDALGTCGSSPLSFVSHCPTGCQRGCAMSYSQQTWMRVSRTPNSPSIWCCQCCLGRLMGSPSCHPPVGPTMGPRGSGRAPFTIMHDFVCCLLSPQDPPGFWPHMFQPGPGLGTREVLGSWCRLLPGLGELLAALSSLLGDPGFCSGKVPIPLIHPISSGTLWLS

SEQ ID NO: 3838 - protein, 116 aa, Homo sapiens
MALKFQGKYDQAVHQEAQMPHGQGNSFSRRPTDFSCLGSEEATKICPSTRLSGEMSRLHFHQSLSSSPTPQTTGRLGGSSKFLVADSLVVIMFQKLKWEWKLSSFLYSKNCLQHIP

SEQ ID NO: 3839 - protein, 1264 aa, Homo sapiens
MSLQREPPRPEPPPPFPPLPLQPPPPRESASRAEQPPRPPRETVRLELVLKDPTDESCVEFSYPELLLCGEQRKKLIHTEDPFNDEHQERQEVEMLAKKFEMKYGGKPRKHRKDRLQDLIDIGFGYDETDPFIDNSEAYDELVPASLTTKYGGFYINTGTLQFRQASDTEEDDITDNQKHKPPKVPKIKEDDIEMKKRKRKEEGEKEKKPRKKVPKQLGVVALNSHKSEKKKKRYKDSLSLAAMIRKFQKEKDALKKESNPKVPVTLSTPSLNKPPCAAAALGNDVPDLNLSSGDPDLPIFVSTNEHELFQEAENALEMLDDFDFDRLLDAASDGSPLSESGGENGTTTQPTYTSQVMPKVVPTLPEGLPVLLEKRIEDLRVAAKLFDEEGRKKFFTQDMNNILLDIELQLQELGPVIRSGVYSHLEAFVPCNKETLVKRLKKLHLNVQDDRLREPLQKLKLAVSNVMPEQLFKYQEDCQARSQAKCAKLQTDEEREKNGSEEDDDEKPGKRVIGPRKKFHWDDTIRTLLCNLVEIKLGCYELEPNKSQSAEDYLKSFMETEVKPLWPKGWMQARMLFKESRSVHNHLTSAPAKKKVIPAPKPKVKEVMVKTLPLHSFPTMLKECSPKKDQKTPTSLVASVSGPPTSSSTAAIAAASSSSAPAQETICLDDSLDEDLSFHSPSLDLVSEALAVINNGNKGPPVGSRISMPTTKPRPGLREEKLASIMSKLPLATPKKLDSTQTTHSSSLIAGHTGPVPKKPQDLAHTGISSGLIAGSSIQNPKVSLEPLPARLLQQGLQRSSQIHTSSSSQTHVSSSSQAQIAASSHALGTSEAQDASSLTQVTKVHQHSAVQQNYVSPLQATISKSQTNPVVKLSNNPQLSCSSSLIKTSDKPLMYRLPLSTPSPGNGSQGSHPLVSRTVPSTTTSSNYLAKAMVSQISTQGFKSPFSMAASPKLAASPKPATSPKPLPSPKPSASPKPSLSAKPSVSTKLISKSNPTPKPTVSPSSSSPNALVAQGSHSSTNSPVHKQPSGMNISRQSPTLNLLPSSRTSGLPPTKNLQAPSKLTNSSSTGTVGKNSLSGIAMNVPASRGSNLNSSGANRTSLSGGTGSGTQGATKPLSTPHRPSTASGSSVVTASVQSTAGASLLANASPLTLMTSPLSVTNQNVTPFGMLGGLVPVTMPFQFPLEIFGFGTDTAGVTTTSGSTSAAFHHSLTQNLLKGLQPGGAQHAATLSHSPLPAHLQQAFHDGGQSKGDTKLPRKSQ

SEQ ID NO: 3840 - protein, 1215 aa, Homo sapiens
MAMRLHFQPPHPNCLYTVELEAFAIYKVLQSYSNIEEDCTMCPSWCLTVRARGHSYFAGFEHHIPQYSLDVPKLFPAVSSGEPTYRSLLLVNKDCKLLTFSLAPQRGSDVILRPTSGLVAPGAHQIILICTYPEGSSWKQHTFYLQCNASPQYLKEVSMYSREEPLQLKLDTHKSLYFKPTWVGCSSTSPFTFRNPSRLPLQFEWRVSEQHRKLLAVQPSRGLIQPNERLTLTWTFSPLEETKYLFQVGMWVWEAGLSPNANPAATTHYMLRLVGVGLTSSLSAKEKELAFGNVLVNSKQSRFLVLLNDGNCTLYYRLYLEQGSPEAVDNHPLALQLDRTEGSMPPRSQDTICLTACPKQRSQYSWTITYSLLSHRDNKAGGKQELCCVSLVAVYPLLSILDVSSMGSAEGITRKHLWRLFSLDLLNSYLERDPTPCELTYKVPTRHSMSQIPPVLTPLRLDFNFGAAPFKAPPSVVFLALKNSGVVSLDWAFLLPSDQRIDVELWAEQAELNSTELHQMRVQDNCLFSISPKAGSLSPGQEQMVELKYSHLFIGTDHLPVLFKVSHGREILLNFIGVTVKPEQKYVHFTSTTHQFIPIPIGDTLPPRQIYELYNGGSVPVTYEVQTDVLSQVQEKNFDHPIFCCLNPKGEIQPGSTARVLWIFSPIEAKTYTVDVPIHILGWNSALIHFQGVGYNPHMMGDTAPFHNISSWDNSSIHSRLVVPGQNVFLSQSHISLGNIPVQSKCSRLLFLNNISKNEEIAFSWQPSPLDFGEVSVSPMIGVVAPEETVPFVVTLRASVHASFYSADLVCKLYSQQLMRQYHKELQEWKDEKVRQEVEFTITDMKVKKRTCCTACEPARKYKTLPPIKNQQSVSRPASWKLQTPKEEVSWPCPQPPSPGILCLGLTARAHATDYFLANFFSGFPCHFLHRELPKRKAPREESETSEEKSPNKWGPVSKQKKQLLVDILTTIIRGLLEDKNFHEAVDQSLVEQVPYFRQFWNEQSTKFMDQKNSLYLMPILPVPSSSWEDGKGKQPKEDRPEHYPGLGKKEEGEEEKGEEEEEELEEEEEEEEETEEEELGKEEIEEKEEERDEKEEKVSWAGIGPTPQPESQESMQWQWQQQLNVMVKEEQEQDEKEAIRRLPAFANLQEALLENMIQNILVEASRGEVVLTSRPRVIALPPFCVPRSLTPDTLLPTQQAEVLHPVVPLPTDLP

SEQ ID NO: 3841 - protein, 124 aa, Homo sapiens
MGENAVIPFLSPQKGHGCREWWLMPIIPALWEAEVGRSPEVRSLRPAWLTWRNPFSTKNTKISQSWWRAPVIPATWETEAGESLEPGRLEVAVSRDWATALQPGQWSISKKKKERKKKEGGCHG

SEQ ID NO: 3842 - protein, 103 aa, Homo sapiens [sequence omitted]

SEQ ID NO: 3843 - protein, 151 aa, Homo sapiens [sequence omitted]

SEQ ID NO: 3844 - protein, 267 aa, Homo sapiens
MPTLHRERQGLSPKEAMLCFIQEACRLEDVPVHFFRLHKDKKEGRPTVILGLALRGVHIYQEVDRAPQLLYDLPWPHVGKLAFLGKKLEIQLDGLPAAQKLVYYTGCTWRSRHLLHLLRASHQLHLRVRPTLQQLRQREEAEEKQHYRESYISDELELDLASRSFPGSGVSSQHCPHCLSRHSADSHGSSYTSGIKANSWLRESREMSVDVPLEVHGLHEKEPSSSPRTSRSHPSTRGDSQATRQEPCTQVRTRGQSAEAVHQFPPV

SEQ ID NO: 3845 - protein, 115 aa, Homo sapiens
MLEEPFSPPLRCGGPSLGWPRPEPAPSACREVWRERPQAGTGAARSDGRPARVPSGSGLSGSCGGGAGYPSTAGLPAPRSNSRSASAASPPGRARDLQPALPESTRGGLPAAKPP

SEQ ID NO: 3846 - protein, 129 aa, Homo sapiens [sequence omitted]

SEQ ID NO: 3847 - protein, 217 aa, Homo sapiens
MWVTKFKGREKKLMKIEAHLGLPSFSGSTLDFFRAWALSRELHLIPWAARSSLGPRLWRLLGGPFLCLHSRRLAGETQDLRLPGHLHCCPLGFCLRLCLGLCLSLRLQLGGRLLVRARFGGPQGFSSPGTLPLLVDGHRGRSPCLGLHPAVAEDLVDVEPPVDVGLQHVVDEVLALACQVLGAWEVDAVLLLDTQHLLDVGVVVGHGAADHDVEDHA

SEQ ID NO: 3848 - protein, 143 aa, Homo sapiens
MKSQMELRIKDLEFKLYKARTSQADCNTTELEKYKELYLEELKLRESLSDELNKRKEILADVSTKLLQEKEWSRSLFTSHTTRPVLESACNGNLNENLGLSRIHIPREALRIPTLNSLSSNIRMESDLSKEDKNGGHFLELQA

SEQ ID NO: 3849 - protein, 609 aa, Homo sapiens
MLLLASTEPSSLCYVETVDIDGETNLKFRQALMVTHKELATIKKMASFQGTVTCEAPNSRMHHFVGCLEWNDKKYSLDIGNLLLRGCRIRNTDTCYGLVIYAGFDTKIMKNCGKIHLKRTKLDLLVNKLVVVIFISVVLVCLVLAFGFGFSVKEFKDHHYYLSGVHGSSVAAESFFVFWSFLILLSVTIPMSMFILSEFIYLGNSVFIDWDVQMYYKPQDVPAKARSTSLNDHLGQVEYIFSDKTGTLTQNILTFNKCCISGRVYGPDSEATTRPKENPYLWNKFADGKLLFHNAALLHLVRTNGDEAVREFWRLLAICHTVMVRESPRERPDQLLYQAASPDEGALVTAARNFGYVFLSRTQDTVTIMELGEERVYQVLAIMDFNSTRKRMSVLVRKPEGAICLYTKGADTVIFERLHRRGAMEFATEEALAAFAQETLRTLCLAYREVAEDIYEDWQQRHQEASLLLQNRAQALQQVYNEMEQDLRLLGATAIEDRLQDGVPETIKCLKKSNIKIWVLTGDKQETAVNIGFACELLSENMLILEEKEISRILETYWENSNNLLTRESLSQVKLALVINGDFLAPVPAVPEVRAPAGCTASPGLQSPP

SEQ ID NO: 3850 - protein, 483 aa, Homo sapiens [sequence omitted]

SEQ ID NO: 3851 - protein, 365 aa, Homo sapiens [sequence omitted]

SEQ ID NO: 3852 - protein, 566 aa, Homo sapiens [sequence omitted]

SEQ ID NO: 3853 - protein, 357 aa, Homo sapiens
MHWLASATQTSASIVSSSLLSAVDVSSSLTMSEYFQNTSLPGTANSRQFSLPVVSNAAFLTGSISNFSRASAPAISSAWLQPSASGTSFQPLMGSAYLYQHSSTTMLSGVTGQSHICTSAASYPGVFEWDSTASTVKKSSSLRDFTVTVIDQNTAVSSMSMTAQYYKTSDTNTMVPLYPSLSASLVQGTLTQIPNQQGHNLSLPCQIGSQVYYYNQGTLGPQLSCLQSYGSVSYTGYRASAHQPEMVMVLKEVQPTNVLPPVSTSGMYYSVSSQPITETSVQVMETSLGMDTSLGLQSPSQTFCLPQTPEFSKSFSSRNTQTLESNPSPELGDISITPVQSPTNLLTLSPAPSQEKK

SEQ ID NO: 3854 - protein, 123 aa, Homo sapiens
MQGGEAEGGWGLESGLSPRPLLQAGDLGQVSSPLCGAGGAFSRLGGSSGTGPETGDLLSPSLSHSLHLSPRLTPTHSISHSLSFSHRLTPCLICSLTHSFLSPSLSLCLSLPLRLVHTLTNGA

SEQ ID NO: 3855 - protein, 906 aa, Homo sapiens
MSATISCKEFADYFAVPVQNKMNPAYIFEVEGKPHSVEEYYLNDLEHIHHSKLSPHLLEEPVITKDIYEVAVSLIQMFDDLDMKESGNKAWSGAQFVLERSSVLVFLPGLGEINYMHELLTSLVHKRLQVYPLHSSVALEEQNNVFLSPVPGYRKIILSTNIAESSVTVPDVKYVIDFCLTRTLVCDEDTNYQSLRLSWASKTSCNQRKGRAGRVSRGYCYRLVHKDFWDNSIPDHVVPEMLRCPLGSTILKVKLLDMGEPRALLATALSPPGLSDIERTILLLKEVGALAVSGQREDENPHDGELTFLGRVLAQLPVNQQLGKLIVLGHVFGCLDECLIIAAALSLKNFFAMPFRQHLDGYRNKVNFSGSSKSDCIALVEAFKTWKACRQTGELRYPKDELNWGRLNYIQIKRIREVAELYEELKTRISQFNMHVDSRRPVMDQEYIYKQRFILQVVLAGAFYPNYFTFGQPDEEMAVRELAGKDPKTTVVLKHIPPYGFLYYKQLQSLFRQCGQVKSIVFDGAKAFVEFSRNPTERFKTLPAVYMAIKMSQLKVSLELSVHSAEEIEGKVQGMNVSKLRNTRVNVDFQKQTVDPMQVSFNTSDRSQTVTDLLLTIDVTEVVEVGHFWGYRIDENNSEILKKLTAEINQLTLVPLPTHPHPDLVCLAPFADFDKQRYFRAQVLYVSGNSAEVFFVDYGNKSHVDLHLLMEIPCQFLELPFQALEFKICKMRPSAKSLVCGKHWSDGASQWFASLVSGCTLLVKVFSVVHSVLHVDVYQYSGVQDAINIRDVLIQQGYAELTEESYESKVNILRAAINKLVCDGPNGCKCLGPERVAQLQDIARQKLLGLFCQSKPREKIVPKWHEKPYEWNQVDPKLVMEQADRESSRGKNTFLYQLHKLVVLGT

SEQ ID NO: 3856 - protein, 738 aa, Homo sapiens
MLKWISWRQSKANKAQLSGGCELTVVLQDFSAGHSSELTIQVGQTVELLERPSERPGWCLVRTTERSPPLEGLVPSSALCISHSRSSVEMDCFFPLVKDAYSHSSSENGGKSESVANLQAQPSLNSIHSSPGPKRSTNTLKKWLTSPVRRLNSGKADGNIKKQKKVRDGRKSFDLGSPKPGDETTPQGDSADEKSKKGWGEDEPDEESHTPLPPPMKIFDNDPTQDEMSLEGSSYRGSLKDPAGCLNEGMAPPTPPKNPEEEQKAKALRGRMFVLNELVQTEKDYVKDLGIVVEGFMKRIEEKGVPEDMRGKDKIVFGNIHQIYDWHKDFFLAELEKCIQEQDRLAQLFIKHERKLHIYVWYCQNKPRSEYIVAEYDAYFEEVKQEINQRLTLSDFLIKPIQRITKYQLLLKDFLRYSEKAGLECSDIEKAVELMCLVPKRCNDMMNLGRLQGFEGTLTAQGKLLQQDTFYVIELDAGMQSRTKERRVFLFEQIVIFSELLRKGSLTPGYMFKRSIKMNYLVLEENVDNDPCKFALMNRETSERVVLQAANADIQQAWVQDINQVLETQRDFLNALQSPIEYQRKERSTAVMRSQPARLPQASPRPYSSVPAGSEKPPKGSSYNPPLPPLKISTSNGSPGFEYHQPGDKFEASKNDLGGCNGTSSMAVIKDYYALKENEICVSQGEVVQVLAVNQQNMCLVYQPASDHSPAAEGWVPGSILAPLTKATAAESSDGSIK

SEQ ID NO: 3857 - protein, 114 aa, Homo sapiens [sequence omitted]

SEQ ID NO: 3858 - protein, 143 aa, Homo sapiens [sequence omitted]

SEQ ID NO: 3859 - protein, 128 aa, Homo sapiens [sequence omitted]

SEQ ID NO: 3860 - protein, 694 aa, Homo sapiens
MDLHKQWENTETNWHKEKMELLDQFDNERKEWESQWKIMQKKIEELCREVKLWRKININESAKIIDLYHEKTIPEKVIESSPNYPDLGQSEFIRTNHKDGLRKENKREQSLVSGGNQMCKEQKATKKSKVGFLDPLATDNQKECEAWPDLRTSEEDSKSCSGALSTALEELAKVSEELCSFQEEIRKRSNHRRMKSDSFLQEMPNVTNIPHGDPMINNDQCILPISLEKEKQKNRKNLSCTNVLQSNSTKKCGIDTIDLKRNETPPVPPPRSTSRNFPSSDSEQAYERWKERLDHNSWVPHEGRSKRNYNPHFPLRQQEMSMLYPNEGKTSKDGIIFSSLVPEVKIDSKPPSNEDVGLSMWSCDIGIGAKRSPSTSWFQKTCSTPSNPKYEMVIPDHPAKSHPDLHVSNDCSSSVAESSSPLRNFSCGFERTTRNEKLAAKTDEFNRTVFRTDRNCQAIQQNHSCSKSSEDLKPCDTSSTHTGSISQSNDVSGIWKTNAHMPVPMENVPDNPTKKSTTGLVRQMQGHLSPRSYRNMLHEHDWRPSNLSGRPRSADPRSNYGVVEKLLKTYETATESALQNSKCFQDNWTKCNSDVSGGATLSQHLEMLQMEQQFQQKTAVWGGQEVKQGIDPKKITEESMSVNASHGKGFSRPARPANRRLPSRWASRSPSAPPALRRTTHNYTISLRSEALMV

SEQ ID NO: 3861 - protein, 1082 aa, Homo sapiens
MDTSSSAHPHLPSLKAEESQMKTQVITHRENSRLIMQKQKKELEASNAKQSIQLQKLFQRNVLDSFYSYVPLSPKRKDQKGRLTIRDLKRELSTKYLTMKIQNHPIPQMLNITGRGTPSNRKKLEYDVKLKNIASWSKDVSGIFIRSLSISIMRSPHTDPKTNLEREKRICLPKFQEKSPNTSEMSKRDTLTIVKGEQNFTNTVPQDPQPFAVDKQQMQKLPNVKSEANLRSEMNKKYLKAQTKERIVPEHDVSRIIKKPDLRIIEQEEKILKRILTPTECPSMLEDPKLPKQRDQSEPVWDMTTQKVQQQKAFPGTVPIPPQVKSSEVKIVADSTNAEHLLPICEATKAISESQVKNMIQDKVSSDKLDNIQAYKPDDLKSPPFPEGPDTISTAIYPKTQHKSLLEQFTPKEKNKLTSHLESKALEIQLNLIPEMARKSLQMFNFYPKGTISKDNSWRFYSRHKTMNFMSLEGTDTIEPNSKHKHQKDSPLASNMKTLIVDVSSDSEETITKLQSINKLENGTSAVTSASEMLLPHTLQNHSVEEKGKLLMHFSVKTLEIQMKAFPRIVRESYAMTSAHERKKPLSNCIHPGFTGPKRQNRILLLSEEKSLHQIDLDLQYKYLRFPLGLPVGSTFPKPNVLPKHSKLNTIAVCKNVNAGGQSGSLSIDTELLEQHISFKKQSPHENSSLIRKFPQPTLVCASDRDLHSPRKKDTQVLSESEFHVTPEKNKQYHVWFQERNTCESVDLRTQRNATGSAVSCETQISEDFVDIQTDIESPADLDECSCLEVSESEECVFLEANSYLSQESENILFELQTGIPLENVYKITTDLKSFYSEDSGSHCTRECRKETLIITPPSCKSHKSSKYRSSSKMKSPDWLCHSSSNTAEIQSRSSSVSFSEEKISWTTNSRTSYSSAPLTESNIKSHLAKNQGKSHRHPESQERKKARSDLFRKNSSHWDHDYSCTHSKGKRDRKKRVYDYESERLDCFQSKHKSASKPHHDDINFYSERKQNRPFFFACVPADSLEVIPKTIRWTIPPETLRKRNFRIPLVAKISSSWNIWSSSKKLLGSLSGSLTTVFHS

SEQ ID NO: 3862 - protein, 151 aa, Homo sapiens [sequence omitted]

SEQ ID NO: 3863 - protein, 786 aa, Homo sapiens [sequence omitted]

SEQ ID NO: 3864 - protein, 146 aa, Homo sapiens
MSSRSLHSQQWTWRMGSARPTLTGSAHPTLRGSARPTLTGSAHPTLTGSAHPHSWPCPAPGAIGVALIQPLFLSGPFPHVALHTHPHSGPSATEQNHATPFTRPPRRGEGLPAECLALHQHLLSSPTTPAPASSRPRSSSSSEPHL

SEQ ID NO: 3865 - protein, 854 aa, Homo sapiens
MKVEACTWAGYSGLYEAIESWDFKKIEKLEEYRLLLKRLQPEFKTRIIPTDIISDLSECLINQECEEILQICSTKGMMAGAEKLVECLLRSDKENWPKTLKLALEKERNKFSELWIVEKGIKDVETEDLEDKMETSDIQIFYQEDPECQNLSENSCPPSEVSDTNLYSPFKPRNYQLELALPAMKGKNTIICAPTGCGKTFVSLLICEHHLKKFPQGQKGKVVFFANQIPVYEQQKSVFSKYFERHGYRVTGISGATAENVPVEQIVENNDIIILTPQILVNNLKKGTIPSLSIFTLMIFDECHNTSKQHPYNMIMFNYLDQKLGGSSGPLPQVIGLTASVGVGDAKNTDEALDYICKLCASLDASVIATVKHNLEELEQVVYKPQKFFRKVESRISDKFKYIIAQLMRDTESLAKRICKDLENLSQIQNREFGTQKYEQWIVTVQKACMVFQMPDKDEESRICKALFLYTSHLRKYNDALIISEHARMKDALDYLKDFFSNVRAAGFDEIEQDLTQRFEEKLQELESVSRDPSNENPKLEDLCFILQEEYHLNPETITILFVKTRALVDALKNWIEGNPKLSFLKPGILTGRGKTNQNTGMTLPAQKCILDAFKASGDHNILIATSVADEGIDIAQCNLVILYEYVGNVIKMIQTRGRGRARGSKCFLLTSNAGVIEKEQINMYKEKMMNDSILRLQTWDEAVFREKILHIQTHEKFIRDSQEKPKPVPDKENKKLLCRKCKALACYTADVRVIEECHYTVLGDAFKECFVSRPHPKPKQFSSFEKRAKIFCARQNCSHDWGIHVKYKTFEIPVIKIESFVVEDIATGVQTLYSKWKDFHFEKIPFDPAEMSK

SEQ ID NO: 3866 - protein, 1205 aa, Homo sapiens
MEQPNSKGYSLGRTPQGPECSSAPAVQVGTHRGLEYNPGKILPGSDYGLGNPPALDPKLPHLPLPPAPPTLSDLGQPRKSPLTGTDKKYPLMKQRGFYSDILSPGTLDQLGEVCRGPRMSQNLLRQADLDKFTPRVGSFEVPEDFQERMEQQCIGSTTRLLAQTDFPLQAYEPKMQVPFQVLPGQHPRKIEIERRKQQYLSLDIEQLLFSQGIDSNKLMPRHLDHQHPQTIEQGHDPIFPIYLPLKVFDNEDFDCRTPREWINMGLEPGSLDRKPVPGKALLPTDDFLGHEDPKSQKLKYKWCEVGVLDYDEEKKLYLVHKTDEKGLVRDEMGRPILNAGVTTEGRPPLQVCQYWVPRIQLLFCAEDPCMFAQRVVQANALRKNTEALLLYNLYVDCMPSDGQHVISEQSLSKIKQWALSTPRMRKGPSVLEHLSSLAREVSLDYERSMNKINFDHVVSSKPETFSYVTLPKKEEEQVPERGLVSVPKYHFWEQKEDFTFVSLLTRPEVITALSKVRAECNKVTAMSLFHSSLSKYSHLEEFEQIQSQTFSQVQMFLKDSWISSLKVAMRSSLRDMSKGWYNLYETNWEVYLMSKLRKLMELVKYMLQDTLRFLVQDSLASFSQFISDTCCSVLNCTDDMVWGDDLINSPYRPRKNPLFIMDLVLDSSGVHYSTPLEQFEASLLNLFDKGILATHAVPQLEKLVMEDIFISGDPLLESVGLHEPLVEELRATIASAVSKAMIPLQAYAKEYRKYLELNNNDIASFLKTYQTQGLLAQEVREVVLTHLREKEILDSSLPSSIIIGPFYINTDNVKQSLSKKRKALATSVLDILAKNLHKEVDSICEEFRSISRKIYEKPNSIEELAELREWMKGIPERLVGLEERIVKVMDDYQVMDEFLYNLSSDDFNDKWIASNWPSKILGQIELVQQQHVEDEEKFRKIQIMDQNNFQEKLEGLQLVVAGFSIHVEISRAHEIANEVRRVKKQLKDCQQLAMLYNNRERIFSLPITNYDKLSRMVKEFQPYLDLWTTASDWLRWSESWMNDPLSAIDAEQLEKNVVEAFKTMHKCVKQFKDMPACQEVALDIRARIEEFKPYIPLIQGLRNPGMRIRHWETLSNQININVRPKANLTFARCLEMNLQDHIESISKVAEVAGKEYAIEQVGSHQRAQPLQPGPAGQPDLLLWQPQPLGRMTVISPIPGVMRPRG

SEQ ID NO: 3867 - protein, 266 aa, Homo sapiens
MAQEKMELDLEPDTSYGGTLRRSSSAPLIHGLSDLSQVFQPYTLRTRRNSTTIMSRHSLLLSSSPNRIPSSRLHQIKREEGLDMVNRETAHEREMQTAMQISQSWDESLSLSDSDFDKPEKLYSPKRIDFTPVSPAPSPTRGFGKMFVSSSGLPPSPVPSPRRFSRRSQSPVKCIRPSVLGPLKRKGEMETESQPKRLFQGTTNMLSPDAAQLSDLSSCSDILDGSSSSSGLSSDPLAKGSATAESPVACSNSCSSFILMDDLSPK

SEQ ID NO: 3868 - protein, 910 aa, Homo sapiens
MTKHPLAMYPNLGEDMPPDLLLQVLKPLDPERKLEDAGSCEGQEKTTDEPTEPGKYPCGEFSPRPPETRVSCLPPEPPKTPVSSLRPEPPETGVSHLRPQPPKTQVSSLHLEPPETGVSHLRPEPPKTQVSSLHLEPPETGVSHLYLEPSGTGVSHLCPEPPKTRVSHLHREPPETGVPDLCLEPPKSRVSHLRPEPSETGVSHLHPEPPKTLVSSLHPEPPETGVSHLCPEPPETRVSPLRQLPPEAGVSHLCPEPPKTRVPPLRPETPKNGVSPLFPEPPKTRISNLRSEPPKIGVSHLCLEPPKTRGSHLRPEPPETGVSHLRPEPPKTRVSSLHLEPPETGVSHLCPEPPEKNVSHLRPEPPDTGVSHLCPEPPKTRVSHLRPEPSETGVSHLRPEPPKILVSSLHQAPPESSVSHLRPEPPETGVSHLRPEPPKTRMYSLRPEPPDTGVSHLCPEPPKTRVSSLPPEPPETGVSHLCPEPPETRVSHLRPEPPETGVSHLRPEPPKTRMYSLRPEPPNTGVSHLCPEPPKTRVSSLPPEPPETGVSHLCPEPPETRVSHLRPEPPETGVSRLHPEPPKTRVSSLHAEPPESRVSHLCPEPPETGVSHLRPEPPKPRVSSLRPEPLETRVSHLRPEPPETGVSHLHPELPKPRVSSLHLEPPKTRRVSSLRLEPPKTGRVSSLCPEPTKTGASHLKELFQEGTSSTMECVSDSLQRRHTSRKLRDFKWAGDLGVNEESISSLFDFTPECRATYQDQKNKKANECSSGLKYSMELDEMDEVKFFSQEKDLDGKIQNAPNSHSAQHVKMGYGAWYLKPKLGKKLRSDEPLIDPKLVLEKPDEPDILDGLYGPIAFKDFILSKGYEMPGIIQRLFARRGWTYDSVKTPIQRAMQVYKYKEDVTDASEED

SEQ ID NO: 3869 - protein, 233 aa, Homo sapiens
MREWENRNRGLRELEEVAGSSRTREQLVPRLGGRAGYDWWASGEVQSGREEAGEAHPSVAESSLRTRGWGGDSHAMTASPVPALQLVSSKRDLVLVKEALSWYDAQQHCRLHYTDLADLQPSGLWKLYSLMTSTPAWIGLFFDASTSGLRWSSGSTFTALEWGQKLPEFGVGFCATLYTWLKLPSIGAASCTAQKPFLCYCGVFTFIFQAWSFPQGPHSVAQAGVQWCDHSSL

SEQ ID NO: 3870 - protein, 127 aa, Homo sapiens
MEKASGALRCQQKRCISELTVMTQIGREGNMWVRVAAMGVNMIKYGGGVQISWTWLQSVFIFSLSERVFGFSILLILQAIHYVPWEVEWPSSLLCVGYTACLTSLWVLHHLHAHMIPLFELMAGNRT

SEQ ID NO: 3871 - protein, 842 aa, Homo sapiens
MGARAAGTSSGGGPRPCLARGLSASPFPAKQQHPQAGASPAELQQRAYYRARQDAASQPGLGFLISPSSCSSWGPGSFTRSCGYPTLCSSWISKREPGELSGVWTSAWRTHAAFTGSQDLCLYKGLLGSIYEDKTALSLLGLGEETNEEDEEESDNQSVHSSSEPLRNLHLDIGALGGDFEYEESLRTSQPEEKKDVSLDSDAAGPPTPCKPSSPGADSSLSSAVGKGRQGSGARPGLPEKEENEKSEPKICRNLVTPKADPTGSEPAKASEKEAPEDTVDAGEEGSRREEAAKEPKKKASALEEGSSDASQELEISEHMKEPQLSDSIASDPKSFHGLDFGFRSRISEHLLDVDVLSPVLGGACRQAQQPLGIEDKDDSQSSQDELQSKQSKGLEERYHRLSPPLPHEERAQSPPRSLATEEEPPQGPEGQPEWKEAEELGEDSAASLSLQLSLQRRSTEPVAPPEQLSEAALKAMEEAVAQVLEQDQRHLLESKQEKMQQLREKLCQEEEEEILRLHQQKEQSLSSLRERLQKAIEEEEARMREEESQRLSWLRAQVQSSTQADEDQIRAEQEASLQKLREELESQQKAERASLEQKNRQMLEQLKEEIEASEKSEQAALNAAKEKALQQLREQLEGERKEAVATLEKEHSAELERLCSSLEAKHREVVSSLQKKIQEAQQKEEAQLQKCLGQVEHRVHQKSYHVAGYEHELSSLLREKRQEVEGEHERRLDKMKEEHQQVMAKAREQYEAEERKQRAELLGHLTGELERLQRAHERELETVRQEQHKRLEDLRRRHREQERKLQDLELDLETRAKDVKARLALLEVQVRDLQESLTSES

SEQ ID NO: 3872 - protein, 104 aa, Homo sapiens [sequence omitted]

SEQ ID NO: 3873 - protein, 181 aa, Homo sapiens
MLARPGVEAWRRRRDARLRAGVGGACVAGAKSHGAGLGAGRRARAETHVTAARRRDGWNFSNPKSRDRPPLACSRALQDPLAHGAVPGRPLLATRATAGLSCLEWWPPPPAGAGALQGPLAYCIVVARRLLAATDIAGSSCSRCTGSTPACWQLGTLLGPLAPTVVADYRETPGAYAVWSQ

SEQ ID NO: 3874 - protein, 1014 aa, Homo sapiens
MPTRSRRKARVGKYGDSMTEADKTKPLSKVSSIAVQTVAEISVQTEPVGTIRTPSIRARVDAKVEIIKHISAPEKTYKGGSLGCQTEADSDTQSPQYLSATSPPKDKKRPTPLEIGYSSHLRADSTVQLAPSPPKSPKVLYSPISPLSPGKALESAFVPYEKPLPDDISPQKVLHPDMAKVPPASPKTAKMMQRSMSDPKPLSPTADESSRAPFQYTEGYTTKGSQTMTSSGAQKKVKRTLPNPPPEEISTGTQSTFSTMGTVSRRRICRTNTMARAKILQDIDRELDLVERESAKLRKKQAELDEEEKEIDAKLRYLEMGINRRKEALLKEREKRERAYLQGVAEDRDYMSDSEVSSTRPTRIESQHGIERPRTAPQTEFSQFIPPQTQTESQLVPPTSPYTQYQYSSPALPTQAPTSYTQQSHFEQQTLYHQQVSPYQTQPTFQAVATMSFTPQVQPTPTPQPSYQLPSQMMVIQQKPRQTTLYLEPKITSNYEVIRNQPLMIAPVSTDNTFAVSHLGSKYNSLDLRIGLEERSSMASSPISSISADSFYADIDHHTPRNYVLIDDIGEITKGTAALSTAFSLHEKDLSKTDRLLRTTETRRSQEVTDFLAPLQSSSRLHSYVKAEEDPMEDPYELKLLKHQIKQEFRRGTESLDHLAGLSHYYHADTSYRHFPKSEKYSISRLTLEKQAAKQLPAAILYQKQSKHKKSLIDPKMSKFSPIQESRDLEPDYSSYMTSSTSSIGGISSRARLLQDDITFGLRKNITDQQKFMGSSLGTGLGTLGNTIRSALQDEADKPYSSGSRSRPSSRPSSVYGLDLSIKRDSSSSSLRLKAQEAEALDVSFSHASSSARTKPTSLPISQSRGRIPIVAQNSEEESPLSPVGQPMGMARAAAGPLPPISADTRDQFGSSHSLPEVQQHMREESRTRGYDRDIAFIMDDFQHAMSDSEGKLGLKLPCYSQNSNSYFSACLISLLQRCILLFLVCLLHVYFNFISCKWKFYHVYRFCSMLFFI

SEQ ID NO: 3875 - protein, 166 aa, Homo sapiens
MTVVVPLIIGQIVRRYIKDWLERKKPPFGAISSSVLLMIIYTTFCDTFSNPNIDLDKFSLVLILFIIFSIQLSFMLLTFIFSTRNNSGFTPADTVAIIFCSTHKSLTLGIPMLKIVFAGHEHLSLISVPLLIYHPAQILLGSVLVPTIKSWMVSRQKGVKLTRPTV

SEQ ID NO: 3876 - protein, 144 aa, Homo sapiens [sequence omitted]

SEQ ID NO: 3877 - protein, 149 aa, Homo sapiens
MAVSSGPPRPSQWEPRLPARADSAHGACPQPVGSPAPAGVGKHRLPVLTQPSASSSCPLWSGASTSKAWSVETSPDVSSQEFRAAASNALLGSRAFLGARRRPNKITKHFLEFQKKTGEKYLQVGMILILVDGPIRTLVGKKRQHKTVR

SEQ ID NO: 3878 - protein, 114 aa, Homo sapiens
MCGPSGDGDPRCGLRNQCVSWTLLTSKLEQKRHLCGALTHPRYFATSFNIPSLRTQTYMGDRGVYNPISYLYTKPWATESVKFMVIKPLHRGGPVSPWKHHTLLPAQEVMEGDG

SEQ ID NO: 3879 - protein, 937 aa, Homo sapiens [sequence omitted]

SEQ ID NO: 3880 - protein, 1013 aa, Homo sapiens [sequence omitted]

SEQ ID NO: 3881 - protein, 106 aa, Homo sapiens
MITEIRRRGSKDPLVKALQLLDSPCEPADGGLKSETLAKRRSSKDLLGKPPQLYDTPYEPAEGGPRAEGKARPPDSRLPENDERPAAEYEQPWEWKKEQIVRALSV

SEQ ID NO: 3882 - protein, 129 aa, Homo sapiens
MLTTSGGGTGPLEGLQEEASISLITALTVSLKTTRPCCLFIGRVSPAFDQLLWNISTLPCRLPCDSWKSRSFVAWRGCKPRAAAPDAFSEQIPQRGCLTSEMNFSQCLRRGRCRNLTPLSNPEQSTQPL

SEQ ID NO: 3883 - protein, 117 aa, Homo sapiens [sequence omitted]

SEQ ID NO: 3884 - protein, 108 aa, Homo sapiens [sequence omitted]

SEQ ID NO: 3885 - protein, 499 aa, Homo sapiens
MFDMGFEPQVMRIVDNVRPDRQTVMFSATFPRAMEALARRILSKPIEVQVGGRSVVCSDVEQQVIVIEEEKKFLKLLELLGHYQESGSVIIFVDKQEHADGLLKDLMRASYPCMSLHGGIDQYDRDSIINDFKNGTCKLLVATSVAARGLDVKHLILVVNYSCPNHYEDYVHRAGRTGRAGNKGYAYTFITEDQARYAGDIIKALELSGTAVPPDLEKLWSDFKDQQKAEGKIIKKSSGFSGKGFKFDETEQALANERKKLQKAALGLQDSDDEDAAVDIDEQIESMFNSKKRVKDMAAPGTSSVPAPTAGNAEKLEIAKRLALRINAQKNLGIESQVDVMQQATNAILRGGTILAPTVSAKTIAEQLAEKINAKLNYVPLEKQEEERQDGGQNESFKRYEEELEINDFPQTARWKVTSKEALQRISEYSEAAITIRGTYFPPGKEPKEGERKIYLAIESANELAVQKAKAEITRLIKEELIRLQNSYQPTNKGRYKVL

SEQ ID NO: 3886 - protein, 671 aa, Homo sapiens [sequence omitted]

SEQ ID NO: 3887 - protein, 794 aa, Homo sapiens [sequence omitted]

SEQ ID NO: 3888 - protein, 1233 aa, Homo sapiens [sequence omitted]

SEQ ID NO: 3889 - protein, 133 aa, Homo sapiens
MLTDVCHLVTSFQVFPPPLSFLSSLLCCFKICMSLTGMPVTSANFVSSLPHEMILLKGTRYVSICTSLKASGYGPLTHWSWLQNNSAETSFQLKIPSNVTQGRNIAPIIKGGNGQRGSAAGSQKRKVRVLFIC

SEQ ID NO: 3890 - protein, 172 aa, Homo sapiens
MQLHDRGLRHLFSAPAGSRCNSSAGGRSYPQINGRCNSSAGGRSYPQINRRCNSSAGGRSYPQINRRCNSSAGGRSYSQMNRRCNSSAGGRSYSQINGRCNSSAGGRSYPQINHWCNSSAGGRSYPQINRRCNSSAGGRSYPQINHWCNSSAGGRSYSQINCRCNSSAGGRR

SEQ ID NO: 3891 - protein, 323 aa, Homo sapiens [sequence omitted]

SEQ ID NO: 3892 - protein, 209 aa, Homo sapiens
MPSMLVVNVHLAPGRANPHGVCVNTSLNHSLIYPIFVVHVSRIQCLCSRIWFSLHVFGVCAYRCAWCGLSPRPVCKRHPTQRPRQDPGLWAVVPGLPLQGRCVLLREHPCLGSNPGSGRQVVGVAASSASLDDAQEHAQSQRAQLLGSLTLGWALGRQPFGECVLMVVSGVSLTNNPPCPLDTGVPSSLAVFLIRVPHRPTARCVSPDL

SEQ ID NO: 3893 - protein, 465 aa, Homo sapiens
MGVEAVMALLEGTPDTPACVVSLSGNQAVRLPLMECVQVTKDVTKAMDEKKFDEALKLRGRSFMNNWEVYKLLAHVRPPVSKSGSHTVAVMNVGAPAAGMNAAVRSTVRIGLIQGNRVLVVHDGFEGLAKGQIEEAGWSYVGGWTDQGGSKLGTKRTLPKKSFEQISANITKFNIQGLVIIGGFEAYTGGLELMEGRKQFDELCIPFVVIPATVSNNVPGSDFSVGADTALNTICTTCDRIKQSAAGTKRRVFIIETMGGYCGYLATMAGLAAGADAAYIFEEPFTIRDLQANVEHLVQKMKTTVKRGLVLRNEKCNENYTTDFIFNLYSEEGKGIFDSRKNVLGHMQQGGSPTPFDRNFATKMGAKAMNWMSGKIKESYRNGRIFANTPDSGCVLGMRKRALVFQPVAELKDQTDFEHRIPKEQWWLKLRPILKILAKYEIDLDTSDHAHLEHITRKRSGEAAV

SEQ ID NO: 3894 - protein, 158 aa, Homo sapiens [sequence omitted]

SEQ ID NO: 3895 - protein, 101 aa, Homo sapiens [sequence omitted]

SEQ ID NO: 3896 - protein, 1315 aa, Homo sapiens
MNFLSTAESRTAQAAASGTTLLPQFRAPSWQTGMHSSAATELFATGPLPSTGTLPPSLSAYQHPTTFSNRNFATTSPLVLQDSTFNTTSNGILSHHDPLLQIKTSQGTVPTALAFERLGSSVLSNSIPPQSSTYRSAQESAPHLLQPQFSLLPSALGGSQQTPQAYSSTLFTSSTASIERALLRECSVIKHHQRPSGTQSIQAQLTGSQHSLHSYLSNSSVVNFQETTRQSSLSCSPIGDSTQNLPDSSPTQNYISMHSSQNVQTQESSSPQSQKFLPAVQSSSFASSTHCQTLQNNITSPDPKSYAERKLDSDVYPSSKQEDGFPMQELQVLQPQASLESSTQRLSDGEINAQESTYKVSKADDRYSQSVIRSNSRLEDQVIGVALQASKKEESVVGSVTQLNQQIGQVNNAATLDLKNSTNLIQTPQIRLNTKDLKQQHPLILKVHESKVQEQHDQIINASSQIQIPNHALGHGHQASLPNTQVLLDSACDLQILQQSILQAGLGQVKASLQAQRVQSPQQIVHPFLQMEGHVIQSNGDHSQQQLHPQNSEVMKMDLSESSKPLQQHLTTKGHFSETNQHDSKNQFVSLGSMCFPEAVLLSDERNILSNVDDILAATAAACGVTPTDFSKSTSNETMQAVEDGDSKSHFQQSLDVRHVTSDFNSMTATVGKPQNINDTSLNGNQVTVNLSPVPALQSKMTLDQQHIETPGQNIPTKVTSAVVGPSHEVQEQSSGPFKKQSATNLESEEDSEAPVDSTLNNNRNQEFVSSSRSISGESATSESEFTLGGDDSGVSMNPARSALALLAMAQSGDAVSVKIEEENQDLMHFNLQKKRAKGKGQVKEEDNSNQKQLKRPAQGKRQNPRGTDIYLPYTPPSSESCHDGYQHQEKMRQKIKEVEEKQPEVKTGFIASFLDFLKSGPKQQFSTLAVRMPNRTRRPGTQMVRTFCPPPLPKPSSTTPTPLVSETGGNSPSDKVDNELKNLEHLSSFSSDEDDPGYSQDAYKSVSTPLTTLDATSDKKKKTEALQVATTSPTANTTGTATTSSTTVGAVKQEPLHSTSYAVNILENISSSESSKPIELDGLPSDQFAKGQDTVAIEGFTDEEDTESGGEGQYRERDEFVVKIEDIETFKEALKTGKEPPAIWKVQKALLQKFVPEIRDGQREFAATNSYLGYFGDAKSKYKRIYVKFIENANKKEYVRVCSKKPRNKPSQTIRTVQAKPSSSSKTSDPLASKTTTTKAPSVKPKVKQPKVKAEPPPKKRKKWKEEFSSSQSDSSPEIHTSSSDDEEFEPPAPFVTRFLNTRAMKETFKSYME

SEQ ID NO: 3897 - protein, 166 aa, Homo sapiens [sequence omitted]

SEQ ID NO: 3898 - protein, 803 aa, Homo sapiens
MPWVEPKPRPGPEQKPKLTKPDSATGPQWYQESQESESEGKQPPPGPLAPPKSPEPSGPLASEQDAPLPEGDDAPPRPSMLDDAPRLPLELDDAPLPEEETPEPTAICRHRHRCHTDCLEGLLSRTFQWLGWQVGAHPWIFLLAPLMLTAALGTGFLYLPKDEEEDLEEHYTPVGSPAKAERRFVQGHFTTNDSYRFSASRRSTEANFVSLLVVSYSDSLLDPATFAEVSKLDGAVQDLRVAREKGSQIQYQQVCARYRALCVPPNPILYAWQVNKTLNLSSISFPAYNHGRHPLYLTGFFGGYILGGSLGMGQLLLRAKAMRLLYYLKTEDPEYDVQSKQWLTHLLDQFTNIKNILALKKIEVVHFTSLSRQLEFEATSVTVIPVFHLAYILIILFAVTSCFGFDCIRNKMCVAAFGVISAFLAVVSGFGLLLHIGVPFVIIVANSPFLILGVGVDDMFIMISAWHKTNLAGDIRERMSNVYSKAAVSITITTITNILALYTGIMSSFRSVQCFCIYTGTTLLFCYFYNITCFGAFMALDGKREVVCLCWLKKADPKWPSFKKFCCFPFGSVPDEHGTDIHPMSLFFRDYFGPFLTRSESKYFVVFIYVLYIISSIYGCFHVQEGLDLRNLASDDSYITPYFNVEENYFSDYGPRVMVIVTKKVDYWDKDVRQKLENCTKIFEKNVYVDKNLTEFWLDAYVQYLKGNSQDPNEKNTFMNNIPDFLSNFPNFQHDINISSSNEIISSRGFIQTTDVSSSAKKKILLFQLRRIAEDCQIPLMVYNQAFIYFDQYAAILEDTVRN

SEQ ID NO: 3899 - protein, 520 aa, Homo sapiens
MEFHNGGHVSGIGGFLVSLTSRMKPHTLAVTPALIFAITVATIGSFQFGYNTGVINAPETIIKEFINKTLTDKANAPPSEVLLTNLWSLSVAIFSVGGMIGSFSVGLFVNRFGRRNSMLIVNLLAATGGCLMGLCKIAESVEMLILGRLVIGLFCGLCTGFVPMYIGEISPTALRGAFGTLNQLGIVIGILVAQIFGLELILGSEELWPVLLGFTILPAILQSAALPCCPESPRFLLINRKKEENATRILQRLWGTQDVSQDIQEMKDESARMSQEKQVTVLELFRVSSYRQPIIISIVLQLSQQLSGINAVFYYSTGIFKDAGVQQPIYATISAGVVNTIFTLLSLFLVERAGRRTLHMIGLGGMAFCSTLMTVSLLLKNHYNGMSFVCIGAILVFVACFEIGPGPIPWFIVAELFSQGPRPAAMAVAGCSNWTSNFLVGLLFPSAAYYLGAYVFIIFTGFLITFLAFTFFKVPETRGRTFEDITRAFEGQAHGADRSGKDGVMGMNSIEPAKETTTNV

SEQ ID NO: 3900 - protein, 213 aa, Homo sapiens
MGRCSWHPECVSGQALVKEALAGTRDMTSTLRFHPQSTQMRRVSPGAPPCPTPTLGGILSREMGPPSPRRPRAVAVRVRKATTCAVFVVTETWESLTGSPTEAGAGLGSEAPGEPRAAGFCTHLLHLPTHTWKKSQAHLEAAQLLSSCPPIPGFSSQLHPGPGTPCNLGSPAPLRGLPVTWSQLPPRGADLTSTTCQWHVPGEQELGLQGPCL

SEQ ID NO: 3901 - protein, 122 aa, Homo sapiens [sequence omitted]

SEQ ID NO: 3902 - protein, 449 aa, Homo sapiens [sequence omitted]

SEQ ID NO: 3903 - protein, 968 aa, Homo sapiens [sequence omitted]

SEQ ID NO: 3904 - protein, 143 aa, Homo sapiens
MIPCGMRFIGLATVLLKPLLKQPSEVLFVKDLTLLNHSMKPTDCTVTLQVAHMSNQDIEKTGAEDHLGITAREAASQKLMVPGSTAHRALSSKPQHFQVRVKVFEARQLMGNNIKPVVKVSIAGQQHQTRIKMGNNPFFNEVG

SEQ ID NO: 3905 - protein, 195 aa, Homo sapiens
MRVGTWICLPGRPGRCRKQHDLGNCPEVPGIFKTLALSPGAPDMMQQPRVETDTIGAGEGPQQAVPWSAWVTRHGWVRWWVSHMPPSWIQWWSTSNWRQPLQRLLWGLEGILYLLLALMLCHALFTTGSHLLSSLWPVVAAVWRHLLPALLLLVLSALPALLFTASFLLLFSTLLSLVGLLTSMTHPGDTQDLDQ

SEQ ID NO: 3906 - protein, 1116 aa, Homo sapiens [sequence omitted]

SEQ ID NO: 3907 - protein, 324 aa, Homo sapiens
MRHREGSWEPWSRPVGEPPEAGWDYTQWKQEREQIDLARLARHRDAQGDWRRPWDLDKAKSTLQDCSQLRGEGPARAGSRRGPRSHQKLQPPPLLPDGKGRGGQANRPSVAPATGSKARGKERLTGRARRWDMKEDKEELEGQEGSQSTRETPSEEEQAQKQSGMEQGRLGSAPAASPALASPEGPKGESVASTASSVPCSPQEPDLAPLDLSLGGAGIPGPRESGCVLGLRPGAQESPVSWPEGSKQQPLGWSNHQAELEVQTCPEPQRGAGLPEPGEDRSGKSGAQQGLAPRSRPTRGGSQRSRGTAGVRRRTGRPGPAGRC

SEQ ID NO: 3908 - protein, 1012 aa, Homo sapiens [sequence omitted]

SEQ ID NO: 3909 - protein, 829 aa, Homo sapiens
MTENKTVSSSSTRDDQTNIGLTCQEVKALREKAWSRTNEGNAMSQSLVIYGASKENSEGFHESKMTNTEGVNKGIYFSYPCRRHSCAVVNIPAPCVNKMISHIQDVESKIQEHLKRFETSFEEWSRTSSTKDLKEDWSVTTPVKEVKPGEKRDEKCPELKQEMETLLSEAIRLIKSLETDRADAEEALKQQRSRKNMINMKIDSWSVWKLQELPLAVQKEHEAYLSDVIELQWHLEDKANQLQHFEKQKTELEEANAKIQADIDYMNEHGPLLDSKQNQELQDLKNHYKKKMEVMDLHRKVNEELEEALEACENARLKAQQIKEEIDKDIYQDEKTIEAYKREIYQLNSLFDHYSSSVINVNTNIEEEEEEVTEAIRETKSSKNELHSLSKMLEDLRRVYDQLTWKQKSHENQYLEAVNDFYAAKKTWDIELSDVAKDFSAISLACTKLTEDNKKLEIDINKITEKTNESIRKKSKYESEIKYLTIMKLKNDKHLKNIYKEAYRIGTLFHLTKHKTDEMEDKIAEVRRKFKGREEFLKKLTQGEVAAGMVLQKKLYSIYEVQALERKELIKNRAICAMSLAELQEPLLQLEDEAERIRSLNKEHSVSKRSAIFKDLEATKSKTMIFYAKINELNEELKAKEEEKKSFDQTLEILKNKFITMRFKREHAQTVFDHYMQEKKDCEERIFEEDQRFRVLLAVRQKTLQDTQKIIADSLEENLRLAQEYQQLQFTFLKEKDNYFNIYDKQLSLDTSIRDKKQLCQLQRRMHTLWQEHFKLVVLFSQMRLANFQTDSQESIQKILAVQEESSNLMQHILGFFQTLTDGTCENDG

SEQ ID NO: 3910 - protein, 214 aa, Homo sapiens
MAALCLRKGPLPLCPRPSHGLKAMGGEGSCQDDTESGALTFLPSDDAQPGKALRPQRSGPGGSERRGRGWGRAGALEEQVRQGPSAQGHPRTQARSRPCSARPHCSCGKGKHGALPQGQCSAWLELMTVTVPCCHHCSHCPGGQPGPQLHRAWTVWSWAVPSSASRACGDGHRRSTCQAQGSCTGLPPLRGCLPRLVPGRPCPHLRQQDKGKWN

SEQ ID NO: 3911 - protein, 950 aa, Homo sapiens
MEDKLHKRSPPPETIKSKLNTSVDTHKIKSSPSPEVVKPKITHSPDSVKSKATYVNSQATGERRLANKIEHELSRCSFHPIPTRSSTLETTKSPLIIDKNEHFTVYRDPALIGSETGANHISPFLSQHPFPLHSSSHRTCLNPGTHHPALTPAPHLLAGSSSQTPLPTINTHPLTSGPHHAVHHPHLLPTVLPGVPTASLLGGHPRLESAHASSLSHLALAHQQQQQLLQHQSPHLLGQAHPSASYNQLGLYPIIWQYPNGTHAYSGLGLPSSKWVHPENAVNAEASLRRNSPSPWLHQPTPVTSADGIGLLSHIPVRPSSAEPHRPLKITAHSSPPLTKTLVDHHKEELERKAFMEPLRSVASTSAKNDLDLNRSQTGKDCHLHRHFVDPVLNQLQRPPQETGERLNKYKEEHRRILQESIDVAPFTTKIKGLEGERENYSRVASSSSSPKSHIIKQDMDVERSVSDLYKMKHSVPQSLPQSNYFTTLSNSVVNEPPRSYPSKEVSNIYGDKQSNALAAAAANPQTLTSFITSLSKPPPLIKHQPESEGLVGKIPEHLPHQIASHSVTTFRNDCRSPTHLTVSSTNTLRSMPALHRAPVFHPPIHHSLERKEGSYSSLSPPTLTPVMPVNAGGKVQESQKPPTLIPEPKDSQANFKSSSEQSLTEMWRPNNNLSKEKTEWHVEKSSGKLQAAMASVIVRPSSSTKTDSMPAMQLASKDRVSERSSAGAHKTDCLKLAEAGETGRIILPNVNSDSVHTKSEKNFQAVSQGSVPSSVMSAVNTMCNTKTDVITSAADTTSVSSWGGSEVISSLSNTILASTSSECVSSKSVSQPVAQKQECKVSTTAPVTLASSKTGSVVQPSSGFSGTTDFIHLKKHKAALAAAQYKSSNASETEPNAIKNQTLSASLPLDSTVICSTINKANSVGNGQASQTSQPNYHTKLKKAWLTRH

SEQ ID NO: 3912 - protein, 112 aa, Homo sapiens
MISVHCNLCLPGSSNFCASASRVAGITGMHHHVWLIFVFLVETGFHHVGQAGLKLQASSDLSAFQSAGITGGSQCILPADFVFCCCCFFVFCFSFLALLGSLHVRLSFIVCF

SEQ ID NO: 3913 - protein, 265 aa, Homo sapiens
MRDLGENTASRRNAPAHPSRNPHHLPPTPDQSSRRPGVSHQRAERAFELLLHHDQDALGHLVHVCVHQSCSESPQGLFHDAHPGVTLTLGQEEKACPEDSASSSSSLPAPSVLGAHTGVGPQAGGHVPGWQDLSTVKLDAPAGPVLPARIPLPQDALHTLRIPSRCSGACTEGLGPAPGNSKEANGFMSRFCQIASEAALFAVAAECRAGHLSGQSGALLPCISWAMRGDLCPLHRSCVPCACDRVFPVYSMLLHVFQFRFVVCE

SEQ ID NO: 3914 - protein, 138 aa, Homo sapiens
MSTVGLFHFPTPLTRICPAPWGLRLWEKLTLLSPGIAVTPVQMAGKKDYPALLSLDENELEEQFVKGHGPGGQATNKTSNCVVLKHIPSGIVVKCHQTRSVDQNRKLARKILQEKVDVFYNGENSPVHKEKREAAKKK

SEQ ID NO: 3915 - protein, 297 aa, Homo sapiens
MYISPPKDWWDAGDPSLPIRTPAMIGCSFVVNRKFFGEIGLLDPGMDVYGGENIELGIKVWLCGGSMEVLPCSRVAHIERKKKPYNSNIGFYTKRNALRVAEVWMDDYKSHVYIAWNLPLENPGIDIGDVSERRALRKSLKCKNFQWYLDHVYPEMRRYNNTVAYGELRNNKAKDVCLDQGPLENHTAILYPCHGWGPQLARYTKEGFLHLGALGTTTLLPDTRCLVDNSKSRLPQLLDCDKVKSSLYKRWNFIQNGAIMNKGTGRCLEVENRGLAGIDLILRSCTGQRWTIKNSIK

SEQ ID NO: 3916 - protein, 978 aa, Homo sapiens
MAVKTSEVMAQLTESRQSILKLESELENKDEILRDKFSLMNENRELKVRVAAQNERLDLCQQEIESSRVELRSLEKIISQLPLKRELFGFKSYLSKYQMSSFSNKEDRCIGCCEANKLVISELRIKLAIKEAEIQKLHANLTANQLSQSLITCNDSQESSKLSSLETEPVKLGGHQVAESVKDQNQHTMNKQYEKERQRLVTGIEELRTKLIQIEAENSDLKVNMAHRTSQFQLIQEELLEKASNSSKLESEMTKKCSQLLTLEKQLEEKIVAYSSIAAKNAELEQELMEKNEKIRSLETNINTEHEKICLAFEKAKKIHLEQHKEMEKQIERLEAQLEKKDQQFKEQEKTMSMLQQDIICKQHHLESLDRLLTESKGEMKKENMKKDEALKALQNQVSEETIKVRQLDSALEICKEELVLHLNQLEGNKEKFEKQLKKKSEEVYCLQKELKIKNHSLQETSEQNVILQHTLQQQQQMLQQETIRNGELEDTQTKLEKQVSKLEQELQKQRESSAEKLRKMEEKCESAAHEADLKRQKVIELTGTARQVKIEMDQYKEELSKMEKEIMHLKRDGENKAMHFSQLDMILDQTKTELEKKTNAVKELEKLQHSTETELTEALQKREVLETELQNAHGELKSTLRQLQELRDVLQKAQLSLEEKYTTIKDLTAELRECKMEIEDEKQELLEMDQALKERNWELKQRAAQVTHLDMTIREHRGEMEQKIIKLEGTLEKSELELKECNKQIESLNDKLQNAKEQLREKEFIMLQNEQEISQLKKEIERTQQRMKEMESVMKEQEQYIATQCKEAIDLGQKLRLTREQVQNSHTELAEARHQQVQAQREIERLSSELEDMKQLSKEKDAHGNHLAEELGASKVREAHLEARMQAEIKKLSAEVESLKEAYHMEMISHQENHAKWKISADSQKSSVQQLNEQLEKAKLELEEAQDTVSNLHQQVQDRNEVIEAANEALLTKGENV

SEQ ID NO: 3917 - protein, 874 aa, Homo sapiens
MSDGKVGESSKKSEIKEIEYTKLKKSKIEDAFSKEGKSDVLLKLVLEQGDSSEILSKKDLPLDSENVQKDLVGLAIENLHKSEEMLKERQSDQDMNHSPNIQSGKDIHEQKNTKEKDLSWSEHLFAPKEIPYSEDFEVSSFKKEISAELYKDDFEVSSLLSLRKDSQSCRDKPQPMRSSTSGATSFGSNEEISECLSEKSLSIHSNVHSDRLLELKSPTELMKSEERSDVEHEQQVTESPSLASVPTADELFDFHIGDRVLIGNVQPGILRFKGETSFAKGFWAGVELDKPEGNNNGTYDGIAYFECKEKHGIFAPPQKISHIPENFDDYVDINEDEDCYSDERYQCYNQEQNDTEGPKDREKDVSEYFYEKSLPSVNDIEASVNRSRSLKIETDNVQDISGVLEAHVHQQSSVDSQISSKENKDLISDATEKVSIAAEDDTLDNTFSEELEKQQQFTEEEDNLYAEASEKLCTPLLDLLTREKNQLEAQLKSSLNEEKKSKQQLEKISLLTDSLLKVFVKDTVNQLQQIKKTRDEKIQLSNQELLGDDQKKVTPQDLSQNVEEQSPSISGCFLSSELEDEKEEISSPDMCPRPESPVFGASGQEELAKRLAELELSREFLSALGDDQDWFDEDFGLSSSHKIQKNKAEETIVPLMAEPKRVTQQPCETLLAVPHTAEEVEILVHNAAEELWKWKELGHDLHSISIPTKLLGCASKGLDIESTSKRVYKQAVFDLTKEIFEEIFAEDPNLNQPVWMKPCRINSSYFRRVKNPNNLDEIKSFIASEVLKLFSLKKEPNHKTDWQKMMKFGRKKRDRVDHILVQELHEEEAQWVNYDEDELCVKMQLADGIFETLIKDTIDVLNQISEKQGRMLLV

SEQ ID NO: 3918 - protein, 169 aa, Homo sapiens [sequence omitted]

SEQ ID NO: 3919 - protein, 221 aa, Homo sapiens
MSELISNGIQIYQLPTDEETAAQANSSVSGLLPFAVVGSTDEVKVGKRMVRGRHYPWGVLQVENENHCDFVKLRDMLLCTNMENLKEKTHTQHYECYRYQKLQKMGFTDVGPNNQPVSFQEIFEAKRQEFYDQCQREEEELKQRFMQRVKEKEATFKEAEKELQDKFEHLKMIQQEEIRKLEEEKKQLEGEIIDFYKMKAASEALQTQLSTDTKKDKHRKK

SEQ ID NO: 3920 - protein, 116 aa, Homo sapiens
MLFIELVLYLPSVSKFIKIRDFLCFPRENSTFLLTVRPVHWCLAPVQANGSAMSSAPISWRDGQRHFQKCSSLQPFTWNKCHKDLWRCFVPGFSTVSAFGDEEEFLPILVVLASIG

SEQ ID NO: 3921 - protein, 978 aa, Homo sapiens
MKSGMINLTSGLATGVTNKKEVDEDKVGICTQKHSENVSKVTSTTTVKSKDTQEPNLSETFNNNEIEKKRNLIPTDKKGKDDEINTHFSLIIDDTEYEKEVLGSDSEIGYKKKIDNARESSFKKDDKLFQLSSLKSKRNLGTTTDTLEIRTRTSSNEGRRDSPTQTCRDEEHHSDYEHVQNVIENIFEDVLELSSSPEPAYYSKLSYDQSPPGDNVLNVIQEISRDSAQSVTTKKVSSSTNKNISAKEKEEEEREKEKVREEIKSEPSKPDDPQNQQESKPGIFPAKFLEDVITEMVKQLIFSSIPETQIQDRCQNVSDKQNQAKLYDTAMKLINSLLKEFSDAQIKVFRPDKGNQFPGGKVSSVPKVPPRYKEPTTDEAPSSIKIKSADKMPPMHKMMRKPSSDKIPSIDKTLVNKVVHSSVCNILNDYGSQDSIWKNINSNGENLARRLTSAVINEIFQHQVNLIFCDEVSVSACLPLESKDVVKKVQKLAQTASKECQTSSPYTIILPHKFLENVISALFSKIFSTISSTKTKEPEDNLSTELNFLQMKLVSAVATEISQDKYMTIQYVETLQSDDDEIIQLVVQSVYNNLLPQFGSQEIIQNCVTSGCKILSENIVDLVLREVASNQLQSYFCGELTPHQCVEVENIVEKILKDVFQTTDVPQPKPSHADKLSYNIIEEIAVKFLSKLLSIFPKVHKERTKSLETDMQKITSKVLNSVQEFISKSKIKLVPPTKESPTVPVADNATIENIVNSIYTSVLKHSGSYTSVFKDLMGKSNVLSDTIGFLMVNAISNSEFQPQVEEEVSNSELVLEAVKIMEKVIKIIDELKSKEKSSSRKGLTLDAKLLEEVLALFLAKLIRLPSSSSKDEKNLSKTELNKIASQLSKLVTAEISRSSISLIASDPEEHCLNPENTERIYQVVDSVYSNILQQSGTNKEFYYDIKDTNTAFPKKVASLIIDGVSSFPLDTINSTFKC

SEQ ID NO: 3922 - protein, 140 aa, Homo sapiens [sequence omitted]

SEQ ID NO: 3923 - protein, 126 aa, Homo sapiens
MYPEPSLFLYCPSKMSVQGPGVEEPVVCWGRILGWHSLRHPTSTSPMLFHMVPGSSTVTSTLEMATVTCPSHRETKHSPCLPDSGVCLLSFYHHLPPVEGFLRNDLPGENPFIPRPPSHPIIQCIL

SEQ ID NO: 3924 - protein, 926 aa, Homo sapiens
MHFRDTSERQSDAVNESSLDSVHLQMIKGMLYQQRQDFSSQDSVSRKKVLSLNLKQTSKTEEIKNVLGGSTCYNYSVKDLQEISGSELCFPSGQKIKSAYLPQRQIHIPAVFQSPAHYKQTFTSCLIEHLNILLFGLAQNLQKALSKVDISFYTSLKGEKLKNAENNVPSCHHSQPAKLVMVKKEGPNKGRLFYTCDGPKADRCKFFKWLEDVTPGYSTQEGARPGMVLSDIKSIGLYLRSQKIPLYEECQLLVRKGFDFQRKQYGKLKKFTTVNPEFYNEPKTKLYLKLSRKERSSAYSKNDLWVVSKTLDFELDTFIACSAFFGPSSINEIEILPLKGYFPSNWPTNMVVHALLVCNASTELTTLKNIQDYFNPATLPLTQYLLTTSSPTIVSNKRVSKRKFIPPAFTNVSTKFELLSLGATLKLASELIQVHKLNKDQATALIQIAQMMASHESIEEVKELQTHTFPITIIHGVFGAGKSYLLAVVILFFVQLFEKSEAPTIGNARPWKLLISSSTNVAVDRVLLGLLSLGFENFIRVGSVRKIAKPILPYSLHAGSENESEQLKELHALMKEDLTPTERVYVRKSIEQHKLGTNRTLLKQVRVVGVTCAACPFPCMNDLKFPVVVLDECSQITEPASLLPIARFECEKLILVGDPKQLPPTIQGSDAAHENGLEQTLFDRLCLMGHKPILLRTQYRCHPAISAIANDLFYKGALMNGVTEIERSPLLEWLPTLCFYNVKGLEQIERDNSFHNVAEATFTLKLIQSLIASGIAGSMIGVITLYKSQMYKLCHLLSAVDFHHPDIKTVQVSTVDAFQGAEKEIIILSCVRTRQVGFIDSEKRMNVALTRGKRHLLIVGNLACLRKNQLWGRVIQHCEGREDGLQHANQYEPQLNHLLKDYFEKQVEEKQKKKSEKEKSKDKSHS

SEQ ID NO: 3925 - protein, 1058 aa, Homo sapiens
MIICLLMTLKLRYLPTKVLQLESCLEHKSRSSPIALIDEKSTNAHLSLPQKSPSLAKEVPDLCFSDDYFSDKGAAKEEKPKNDQEPVNRIIQKKENNDHFELDCTGPSIKSPSSSIIKKASFEHGKKQENDLDLLSDFIMLRNKYKTCTSKTEVTNSDEKHDKEACSLTLQEESPIVHINKTLEEINQERGTDSVIEIQASDSQCQAFCLLEAAASPILKNLVSLCTLPTANWKFATVIFDQTRFLLKEQEKVVSDAVRQGTIDEREMTFKHAALLHLLVTIRDVLLTCSLDTALGYLSKAKDIYNSILGPYLGDIWRQLEIVQFIRGKKPETNYKIQELQCQILSWMQSQQQIKVLIIIRMDSDGEKHFLIKILNKIEGLTLTVLHSNERKDFLESEGVLRGTSSCVVVHNQYIGADFPWSNFSFVVEYNYVEDSCWTKHCKELNIPYMAFKVILPDTVLERSTLLDRFGGFLLEIQIPYVFFASEGLLNTPDILQLLESNYNISLVERGCSESLKLFGSSECYVVVTIDEHTAIILQDLEELNCEKASDNIIMRLMALSLQYRYCWIILYTKETLNSEYPLTEKTLHHLALIYAALVSFGLNSEELDVKLIIAPGVEATALIIRQIADHSLMTSKRDPHEWLDKSWLKVSPSEEEMYLLDFPCINPLVAQLMLNKGPSLHWILLATLCQLQELLPEVPEKVLKHFCSITSLFKIGSSSITKSPQISSPQENRNQISTLSSQSSASDLDSVIQEHNEYYQYLGLGETVQEDKTTTLNDNSSIMELKGISSFLPPVTSYNQTSYWKDSSCKSNIGQNTPFLINIESRRPAYNSFLNHSDSESDVFSLGLTQMNCETIKSPTDTQKRVSVVPRFINSQKRRTHEAKGFINKDVSDPIFSLEGTQSPLHWNFKKNIWEQENHPFNLQYGAQQTACNKLYSQKGNLFTDQQKCLSDESEGLTCESSKDETFWRELPSVPSLDLFRASDSNANQKEFNSLYFYQRAGKSLGQKRHHESSFNSGDKESLTGFMCSQLPQFKKRRLAYEKVPGRVDGQTRLRFF

SEQ ID NO: 3926 - protein, 539 aa, Homo sapiens
MPGQRRALSPKMASMRESDTGLWLHNKLGATDELWAPPSIASLLTAAVIDNIRLCFHGLSSAVKLKLLLGTLHLPRRTVDEMKGALMEIIQLASLDSDPWVLMVADILKSFPDTGSLNLELEEQNPNVQDILGELREKVGECEASAMLPLECQYLNKNALTTLAGPLTPPVKHFQLKRKPKSATLRAELLQKSTETAQQLKRSAGVPFHAKGRGLLRKMDTTTPLKGIPKQAPFRSPTAPSVFSPTGNRTPIPPSRTLLRKERGVKLLDISELDMVGAGREAKRRRKTLDAEVVEKPAKEETVVENATPDYAAGLVSTQKLGSLNNEPALPSTSYLPSTPSVVPASSYIPSSETPPAPSSREASRPPEEPSAPSPTLPAQFKQRAPMYNSGLSPATPTPAAPTSPLTPTTPPAVAPTTQTPPVAMVAPQTQAPAQQQPKKNLSLTREQMFAAQEMFKTANKVTRPEKALILGFMAGSRENPCQEQGDVIQIKLSEHTEDLPKADGQGSTTMLVDTVFEMNYATGQWTRFKKYKPMTNVS

SEQ ID NO: 3927 - protein, 712 aa, Homo sapiens [sequence omitted]

SEQ ID NO: 3928 - protein, 100 aa, Homo sapiens [sequence omitted]

SEQ ID NO: 3929 - protein, 933 aa, Homo sapiens
MSCSLLPALPLVPPGTHNPIKTNWMAWHGGSCLSSQHYGGPRRVDHLRSGVQDQPDQHGETLSVLKIKKKLARCGGVRLGRLRQENRLNTATSLTAEGAVSQDHATALQPGRQSKTLSQRNKTNWRPPQVAGSGEGLHLCTPPWLSVADPQAFNVVFEKAIQRTTPANEVKQRVINLTDEITYSVYMYTARGLFERDKLIFLAQVTFQVLSMKKELNPVELDFLLRFPFKAGVVSPVDFLQHQGWGGIKALSEMDEFKNLDSDIEGSAKRWKKLVESEAPEKEIFPKEWKNKTALQKLCMVRCLRPDRMTYAIKNFVEEKMGSKFVEGRSVEFSKSYEESSPSTSIFFILSPGVDPLKDVEALGKKLGFTIDNGKLHNVSLGQGQEVVAENALDVAAEKGHWVILQNIHLVARWLGTLDKKLERYSTGSHEDYRVFISAEPAPSPETHIIPQGILENAIKITNEPPTGMHANLHKALDLFTQDTLEMCTKEMEFKCMLFALCYFHAVVAERRKFGAQGWNRSYPFNNGDLTISINVLYNYLEANPKVPWDDLRYLFGEIMYGGHITDDWDRRLCRTYLAEYIRTEMLEGDVLLAPGFQIPPNLDYKGYHEYIDENLPPESPYLYGLHPNAEIGFLTVTSEKLFRTVLEMQPKETDSGAGTGVSREEKVKAVLDDILEKIPETFNMAEIMAKAAEKTPYVVVAFQECERMNILTNEMRRSLKELNLGLKGELTITTDVEDLSTALFYDTVPDTWVARAYPSMMGLAAWYADLLLRIRELEAWTTDFALPTTVWLAGFFNPQSFLTAIMQSMARKNEWPLDKMCLSVEVTKKNREDMTAPPREGSYVYGLFMEGARWDTQTGVIAEARLKELTPAMPVIFIKAIPVDRMETKNIYECPVYKTRIRGPTYVWTFNLKTKEKAAKWILAAVALLLQV

SEQ ID NO: 3930 - protein, 108 aa, Homo sapiens [sequence omitted]

SEQ ID NO: 3931 - protein, 180 aa, Homo sapiens [sequence omitted]

SEQ ID NO: 3932 - protein, 106 aa, Homo sapiens [sequence omitted]

SEQ ID NO: 3933 - protein, 656 aa, Homo sapiens [sequence omitted]

SEQ ID NO: 3934 - protein, 181 aa, Homo sapiens [sequence omitted]

SEQ ID NO: 3935 - protein, 129 aa, Homo sapiens
MACRERIGDNSGPQRRAATEGEAGERAAAPALGRVLWSTQKDCPGSKGPEEKAALGSAPPAGSLLPREAERCPPTRRALCYPVLSGFAEPSTTQPRPPEKTPLTPTSCHPTACWGDRPQCLIHGLLRRF

SEQ ID NO: 3936 - protein, 533 aa, Homo sapiens
MLPRQASISCAQGILLPQPSELLRLQLNLVMNEQKEKITEKVILSMTAKEHHKEQEEVSRRIDELQTAIKSNIGHLCKLGPQLQAEQEQFSSYVYQHIKSLPANTLVPGGLQLKVFENGKNTGEISVGISKKDLGSDSPIQTDHMMERLLLKIHQRLQGSSINPPGLNYSSMRLFDENGQEIKNPLSLKNEQKIWVSYGRAYRSPLNLALGLTFDRVSAFARGDIMVAYKTFLDPNAVLLPGCGNWEVCEGFPINFNCTSQQIPDQFEKVDLENHFLQNKVDPNIVLHASVSIGKWSFSGSEASSRSQIAPSILWPVASVWLITKTGMILSRAITQGCLAIGHPIRVKAAEGTSLEGYKLILQKRHSGDDSQKWVFGTDGCIYSKAYPQFVLTYLEELNAQVDVTQTEYHIHHGAWTTAHQEHGRNLAEEVLQESASNLGLKQLPEPSDTHLMPEGSLEETGELTVALVRKLEEKHPKASAQRWAIKHEGTSKPGQWKHSRVENPLWNKLTYMWPVLPSGQLNEAMQTEQGRR

SEQ ID NO: 3937 - protein, 234 aa, Homo sapiens
MLTTDDKAVVLKRIHEVHVKMDRSLEYQPVECAIVINAAGAWSAQIAALAGVGEGPPGTLQGTKLPVEPRKRYVYVWHCPQGPGLETPLVADTSGAYFRREGLGSNYLGGRSPTEQEEPDPANLEVDHDFFQDKVWPHLALRVPAFETLKVQSAWAGYYDYNTFDQNGVVGPHPLVVNMYFATGFSGHGLQQAPGIGRAVAEMVLKGRFQTIDLSPFLFTRFYLGEKIQENNII

SEQ ID NO: 3938 - protein, 232 aa, Homo sapiens; identical to SEQ ID NO: 3829

SEQ ID NO: 3939 - protein, 140 aa, Homo sapiens
MAQQRALPQSKETLLQSYNKRLKDDIKSIMDNFTEIIKTAKIEDETQVSRATQGEQDNYEMHVRAANIVRAGESLMKLVSDLKQFLILNDFPSVNEAIDQRNQQLRTLQEECDRKLITLRDEISIDLYELEEEYYSSRYK

SEQ ID NO: 3940 - protein, 361 aa, Homo sapiens
MWKENGKKPGSFPTQLRPNYQLNSSRNMLTSTAVKHDLAESFPFWASKGKLEWQHIHQQPPYSKCFEDHLEQKYVQLFWGLPSLHSESLHPTVFVQHGRSSMFVFFNGITNTSMSHESPVLPPPQPLFLPSTQPLPLPQTLPRGQSLHLTQVKSLAQPQSPFPALPPSPLFLIRVCGVCFHRPQNEARSLMPSEINHLEWNVLQKVQESVWGLPSVVQKSQEDFCPPAPNPVLVRKSFKVHVPISIIPGDFPLSSEVRKKLEQHIRKRLIQRRWGLPRRIHESLSLLRPQNKISELSVSESIHGPLNISLVEGQRCNVLKKSASSFPRSFHERSSNMLSMENVGNYQGCSQETAPKKPSLA

SEQ ID NO: 3941 - protein, 266 aa, Homo sapiens
MAEAGKVPLSLGLTGGEAAEWPLQRYARCIPSNTRDPPGPCLEAGTAPCPTWKVFDSNEESGYLVLTIVISGHFFIFQGQTLLEGFSLIGSKDWLKIVRRVDCLLFGTTIKDKSRLFRVQFSGESKEQALEHCCSCVQKLAQYITVQVPDGNIQELQLIPGPPRATESQGKDSAKSVPRQPGSHQHSEQQQVCVTAGTGAPDGRTSLTQLAQTLLASEELPHVYEQSAWGAEELGPFLRLCLMDQNFPAFVEEVEKELKKLAGLRN

SEQ ID NO: 3942 - protein, 104 aa, Homo sapiens
MQSSWQVPLHPPGSPWPQLTLRILPVWGVLREPLQIVLEQQLVPGDPLHGLQHVVLQRQVPAYLLLLWGQREHWALQGHVCGCQPHRLLATTAPGSCPELAAQN

SEQ ID NO: 3943 - protein, 1080 aa, Homo sapiens [sequence omitted]

SEQ ID NO: 3944 - protein, 119 aa, Homo sapiens [sequence omitted]

SEQ ID NO: 3945 - protein, 108 aa, Homo sapiens
MEKTQTIGRGDEHVIIVTTCLEATRMEWGRLKEEIFTGLTSHHSSRVVVITPEGKIISVFYGLIIGDSSCFEDTNTEASSRTYSQFPWSQCCQWFYKGLMNLYLVDHK

SEQ ID NO: 3946 - protein, 113 aa, Homo sapiens
MQAASLRAGILQIVGLKIIRNVEALKAFLRNSRATMAHQWCYGAMGAPQFGLSYLEGSAGHSANTPAFHILGDHVWMALMCPILVEEHRKASFLHFKEARETCEVFSTSLVHP

SEQ ID NO: 3947 - protein, 150 aa, Homo sapiens [sequence omitted]

SEQ ID NO: 3948 - protein, 129 aa, Homo sapiens
MTQTHSLRSVFVFQRYVCISPTLRFMVTQSRGFSLALPTAETCSFLARYPQGPAAGGGTSQSGWGPPSGQNIILWKKVFSNAFLRQDLVLSPRVGSAVVQLRGNSMLAVLTALARSRRLLCLGSYFGGT

SEQ ID NO: 3949 - protein, 122 aa, Homo sapiens [sequence omitted]

SEQ ID NO: 3950 - protein, 257 aa, Homo sapiens [sequence omitted]

SEQ ID NO: 3951 - protein, 143 aa, Homo sapiens; identical to SEQ ID NO: 3816

SEQ ID NO: 3952 - protein, 113 aa, Homo sapiens
MSHCPRACKLFFNFSSWTSLCCGSPSVSLASHSQTGKARSFSSLAFSSSISFLLGHSSVLIYSGFFLFKNLFHSYVSCGLDEILHDFIQSHGTRLLESSEICLFINPLQWDSH

SEQ ID NO: 3953 - protein, 166 aa, Homo sapiens
MEGTYITSEHSYQKPQSFGQDCKSLADPGSSDDDDVSSLEEEQEFHMRSKNSLQYSAKEHGMPEKNPAEGNTVFVYNDKKGTEDPGDSHLQWQLNLLTHIENVQNEVTSRMDLIEKEVDVLESWLDFTGELEPPDPLARLPQLKRHIKQLLIDMGKVQQIATLCSV

SEQ ID NO: 3954 - protein, 117 aa, Homo sapiens
MKKVKKKRSEARRHRDSTSQHASSNSTSQQPSPESTPQQPSPESTPQHSSLETTSRQPAFQALPAPEIRRSSCCLLSPDANVKAAPQSRKAGGLSSSFSSSSLPADGVLGHPKGWFL

SEQ ID NO: 3955 - protein, 189 aa, Homo sapiens
MFGSSRGGVRGGQDQFNWEDVKTDKQRENYLGNSLMAPVGRWQKGRDLTWYAKGRAPCAGPSREEELAAVREAEREALLAALGYKNVKKQPTGLSKEDFAEVCKREGGDPEEKGVDRLLGLGSASGSVGRVAMSREDKEAAKLGLSVFTHHRVESGGPGTSAASARRKPRAEDQTESRGVSRVTLEERS

SEQ ID NO: 3956 - protein, 968 aa, Homo sapiens [sequence omitted]

SEQ ID NO: 3957 - protein, 180 aa, Homo sapiens
MASLSGPPCASTLQPMSATHSRGPWTWPPAGAVLSDPSFSLSPFSAASSSPGSILSLNSMTQLPPLSPKSRLLLWPFPLSLKPASVWTQLLPSPHSRRGCSALLERPPPLNSAHQTSTIQPLRGPQSYLAIGLLAPNHLPLPSSSSSSLHHFLITSDLSSSAEDLSPSVYTEWPLAENPP

SEQ ID NO: 3958 - protein, 161 aa, Homo sapiens [sequence omitted]

SEQ ID NO: 3959 - protein, 136 aa, Homo sapiens
MPSSIDIIDGTKEKKTKLDGGSASLLRLQEELSLPQTEVLEFGVPLLRAAAWELWPKEQQIALHLECACFLQVLACRCGSCHGGDFVPFHHFAVCSTKNSKGTSRFCTYRDTGSVLTQVITEKLQLPSPQEQRKSS

SEQ ID NO: 3960 - protein, 193 aa, Homo sapiens
MTNSTVPDVLCIGPPEYQEKKLNDVTSFDYECTTTDFVVHQTLPYQSVSVDTFNSKNDVYVAIAQPSMENCMVLEWDHIEMNFRSYDNITGQSIVGCKAILIDDQVFVVVAQLFGGSHIYKYDESWTKFVKFQDIEVSRISKPNDIELFQIDDETFFVIADSSKAGLSTVYKWNSKGFYSYQPLPGPHHPPVE

SEQ ID NO: 3961 - protein, 267 aa, Homo sapiens
MVRGAGPGPSLSALSHPTGASGMAAAEGPGYLVSPQAEKHRRARNWTDAEMRGLMLVWEEFFDGLKQTKRNAKVYEKMASKLFEMTGERRLGEEIKIKITNMTFQYRKLKCMTDSESAPPDWPYYLAIDGILAKVPESCDGKLPDSQPPGPSTSQTEASLSPPAKSTPLYFPYNQCSYEGRFEDDRSDSSSSLLSLKFRSEERPVKKRKVQSCHLQKKQLRLLEAMVEEQRRLSRAVEETCREISRCYSTVCRRGCPVAMEWLWTLS

SEQ ID NO: 3962 - protein, 238 aa, Homo sapiens
MPGRTGLAGEMPVGWGPGRAGASEPNESTCAPEALDGHLGVARREGPILGTLLGRGKGHCQALSQLGHCPSPAWNNYSGMMDIGVAPSRVGPSGHCGVLRSHSRPGELAVVMNHKVPRHRPVSSVGTELLWVRCAPKMVQLPICCLLLTPAPGIGPRAHGHLHTNLETRGLPRGTRESQQAEGEGEAIQEGRGACKRAQRKEGEGPRGPCVVRAGGVGWGTRQVAGEPPLVDCSTAGT

SEQ ID NO: 3963 - protein, 151 aa, Homo sapiens
MRMAPTESTEGRRLWPGPREGGSGKETTSEKLSNLPRPHSYSPKRADAESFRGVPAAFKKCREVFRACWGSRELLFLFKAISEAGPAQNSCGITLEKAGGLEDTGSHWLSWARCKVLYINGFTDPWKDAQAWILIVSCKKGKGTPEREGRN

SEQ ID NO: 3964 - protein, 119 aa, Homo sapiens
MPWGGVGAQPPLFYLLGKGLQWGLEYRGFHGSPGDPEHFYSFYQDKEGLCIRLSTLNWFLWCFIDEIRMHRRPQARYLLSPQCSAPPAQGSGFPRRTQLTPTPQEAQAGLCRAHKPGPV

SEQ ID NO: 3965 - protein, 101 aa, Homo sapiens
MRFPSPGPVKNVDGDWTTVKMQVYQDAPSTTLCAGPGPTYLQPLAVLRGRCHPSCLQRSRHSQLRRTVAEQILHLFTGVLHRNAIFLLVSVASHSEVRRGD

SEQ ID NO: 3966 - protein, 1197 aa, Homo sapiens
MSDENMSKTQTVYDSDSQSGSSAKEKDRGANLCVMDHFMKIFLYCRRAMVLAHRGGYWTLLQNCCRALWNFTQELQILLKQAVDLDKTFPISQDGFFCTSVLPFYLGAELLIDMLIQLQNTSSIKPIEDKGEFSVPSCYGNIKNDNGGSSLTFEHPLDDVNVVDLKWIHDFVLKSLEVLYQVEKWETLVSLAIQFNTVSHERYTEQVTPLLVYAQRQLLLRIQKFKGPDITQQPCARYEAEYGEKITCRNFIGKQLKINSSTIEATSNCTDLLKMLISSEYSRAKALVCVPVDVTDTLRCFRETLEKSKYHNRSIRHSRKLLSLFLAQTQDVLQASNQRSLKVQALHSLGSLLIFAEKKRAAFKCWCQALDDIFRKPDVLHTWKEFGPSLTNVTNSHSPPGFKDYSEEFLSRVGIWGCLQGAVISAKIAQFIKSLNVEKKTDCCILSALLFQGLLRTTLPHPKAERCYAQYEITQLLPGIELFSDRYRADICSVIASLYYIIRELHFVRQNLIVLPLLALYQYFVSGICQDITRNLEARILKIEVLIDLRFFSEAFYEISQIFYGKNMPCPIPAGYKATGKMKIFQSFDSGKPLTSKENIQAIDELRNKGLPAVLVTIGQPHLLNKFNFVKAYFFLSVAATINCVPENKFKTVITNKSKPNLPNLKEIYSKDDGSSFYNLTKLKDEITLSMLKSMLLMEAEDRLNFLLSEVEQKTLSQCSAGELEIVVEARLQLAAVALQRHRAAYSAAIVFSTLTLLQDSKLFEKKVVQDDTENPVSPGTSVTENKDDNEFLDPISLNAREYFNIHLWLRCRLALVTAFVAQIHGIGIVKEDDMTDCLSLINEVCMEAKSAGDTELQAEFLTQAVILGLQEKHLKADIMTNLQDIIHLLEGNEFISPQSRLTLARSLVLLDDLTKAEKFKESPSSKTGKLNLLTRAHSILTEQMLAFGETIEFRSSNTKYANPLQPLKNIYLPHVMLLAKIKMRIGHTVAKQVYYKNKRKDPSKWLPALHLFDVALKLCRTTAVEEHEVEAEILFQKGKIERQILMEEKSPSFQLESLYEAIQLSLKNDQNSGLIRDSYLEMALLYFHLKKPKIKISGSPLTLKPPLRRSSSVKETSANKFEMYSSLAWIAIRAAAQVSEAVLAINLLIGKKNTRMHKVNQVALPNIPEFAALDLLSSYTDYLLGMFGCLHIMQKN

SEQ ID NO: 3967 - protein, 510 aa, Homo sapiens [sequence omitted]

SEQ ID NO: 3968 - protein, 1078 aa, Homo sapiens
MSSSDGKVLPLNVQVVTQHMQSVKQAPKTPQNVPASPGGDRSARHRYPQILPKPANTSALTIRSPTTVLFTSSPIKTAVVPASHMSSLNVVKMTTISLTPSNSNTPLKHSASVSSATGTTEESRSVPQIKNGSVVSLQSPGSRSSSAGGTSAVEVKVEPETSSDEHPVQCQENSDEAKAPQTPSALLGQKSNTDGALQKPSNEGVIEIKATKVCDQRTKCKSRCNKMLPGTSTGNNQSTITLSVASQNLTFTSSSSPPNGDSINKDPKLCTKSPRKRLSSTLQETQVPPVKKPIVEQLSAATIEGQKQGSVKKDQKVPHSGKTEGSTAGAQIPSKVSVNVSSHIGANQPLNSSALVISDSALEQQTTPSSSPDIKVKLEGSVFLLDSDSKSVGSFNPNGWQQITKDSEFISASCEQQQDISVMTIPEHSDINDLEKSVWELEGMPQDTYSQQLHSQIQESSLNQIQAHSSDQLPLQSELKEFEPSVSQTNESYFPFDDELTQDSIVEELVLMEQQMSMNNSHSYGNCLGMTLQSQSVTPGAPMSSHTSSTHFYHPIHSNGTPIHTPTPTPTPTPTPTPTPTPTSEMIAGSQSLSRESPCSRLAQTTPVDSALGSSRHTPIGTPHSNCSSSVPPSPVECRNPFAFTPISSSMAYHDASIVSSSPVKPMQRPMATHPDKTKLEWMNNGYSGVGNSSVSGHGILPSYQELVEDRFRKPHAFAVPGQSYQSQSRHHDTHFGRLTPVSPVQHQGATVNNTNKQEGFAVPAPLDNKGTNSSASSNFRCRSVSPAVHRQRNLSGSTLYPVSNIPRSNVTPFGSPVTPEVHVFTNVHTDACANNIAQRSQSVPLTVMMQTAFPNALQKQANSKKITNVLLSKLDSDNDDAVRGLGMNNLPSNYTARMNLTQILEPSTVFPSANPQNMIDSSTSVYEFQTPSYLTKSNSTGQINFSPGDNQAQSEIGEQQLDFNSTVKDLLSGDSLQTNQQLVGQGASDLTNTASDFSSDIRLSSELSGSINDLNTLDPNLLFDPGRQQGQDDEATLEELKNDPLFQQICSESMNSMTSSGFEWIESKDHPTVEMLG

SEQ ID NO: 3969 - protein, 988 aa, Homo sapiens
MSAGDAKNLLDTKLPTSELKIYAKDIIINILETIVKEFGKVKQTKALPSDQIIAAGKIVNTVLQELYVTNNCNLAYPMKSSHLRLSQGNIGTGSLPKQQACFYLENVSSQLEHIFPREGIFKKLFDKWQTESNDKENEKCKLLMIAENVLTEISIKAKELEYSLSLLNLPPLENCESRFYNHFKGASTRAEDTKAQINMFGREIVEMLLEKLQLCFLSQIPTPDSEETLSNSKEHITAKSKYGFPNKHSLSSLPIYNTKTKDQISVGSSNQIVQEIVETVLNMLESFVDLQFKHISKYEFSEIVKMPIENLSSIQQKLLNKKRLPKLQPLKMFSDKSESNTINFKENIQNILLRVHSFHSQLLTYAVNIISDMLAVIKNKLDNEISQMEPSSISILKENIVASEIIGTLMDQCTYFNESLIQNLSRESLFQGAENAYTVNQVELATNMKMFTSKLKEGSLGINPSQVSKTGFVFCSDEDMKEKYRVSSDLPTSVRSSVEDTVKNSEPTKRPDSETMPSCSTRNKVQDHRPRESNFGSFDQTMKGNSYLPEGSFLQKLLRKASDSTEAALKQVLSFIEMGKGENLRVFHYENLKPVVEPNQIQTTISPLKICLAAENIVNTVLSSCGFPSQPHTNENREIMKPFFISKQSSLSEVSGGQKDNEKSLLRMQDKKINYIPEEENENLEASREDSSFLQKLKKKEYPKIETVKEVEAFTFADHEMGSNEVHLIARHVTTSVVTYLKNFETTVFSEEKMSVSTWSRKKYESKQFLRNIYDDSSIYQCCEHLTESVLYHLTSSISDGTKKGREKEKAWEIQEATFSKIISIHSQVFESRSISIGELALCISEIIIKILFNNKIIQADIAQKMVAIPTKYTYCPGIVSGGFDDLFQDLLVGVIHVLSKEIEVDYHFESNVRDKSFSMHRNNSVPICNKINRQASPRDWQFSTQQIGQLFQKNKLSYLACKLNSLVGNLKTSESKEVVNKVFNIVS

SEQ ID NO: 3970 - protein, 113 aa, Homo sapiens
MQSWGPPAPPASSSLRAPHQKVLTRKSIPFLQHRPLGPCSLHLHPLSHHSPHPHSSHRSRSSSWAIPTTPPRVSPAPPCAGQCPPPGPDLPPSWPLPRPEPSVHAAVTTVRLA

SEQ ID NO: 3971 - protein, 323 aa, Homo sapiens
MEVLSGVAKGYNICLFAYGQTGSGKTYTMLGTPASVGLTPRICEGLFVREKDCASLPSSCRIKVSFLEIYNERVRDLLKQSGQKKSYTLRVREHPEMGPYVQGLSQHVVTNYKQVIQLLEEGIANRITAATHVHEASSRSHAIFTIHYTQAILENNLPSEMASKINLVDLAGSERADPSYCKDRIAEGANINKSLVTLGIVISTLAQNSQVFSSCQSLNSSVSNGGDSGILSSPSGTSSGGAPSRRQSYIPYRDSVLTWLLKDSLGGNSKTIMVASEWDARAGPVLGLVLYLRERAMAPVSGMPELDLCWDWYSISEKGPWPQ

SEQ ID NO: 3972 - protein, 139 aa, Homo sapiens [sequence omitted]

SEQ ID NO: 3973 - protein, 241 aa, Homo sapiens [sequence omitted]

SEQ ID NO: 3974 - protein, 133 aa, Homo sapiens [sequence omitted]

SEQ ID NO: 3975 - protein, 109 aa, Homo sapiens
MWASPAPTLIDSGDSVVAKYINRFRQAQPTSREERQPAGPTPADFWWLQSDSPGPSSQSAAAGANKPEGRPHTAVPTAVNVTSASHAVAPLQEIKQVTSPFTPSLGCLN

SEQ ID NO: 3976 - protein, 147 aa, Homo sapiens [sequence omitted]

SEQ ID NO: 3977 - protein, 109 aa, Homo sapiens
MAWGSVGVGPLVVWVCAGVGWCGCRRLGGCVRVLGIHVVWGCVDVYTGVSAGVDGVCAGVACLVWVVGVRAGMCVVCRRVGSCGGVQVCVLGIDVAWVAGCVQVLGVCR

SEQ ID NO: 3978 - protein, 102 aa, Homo sapiens [sequence omitted]

SEQ ID NO: 3979 - protein, 115 aa, Homo sapiens [sequence omitted]

SEQ ID NO: 3980 - protein, 150 aa, Homo sapiens [sequence omitted]

SEQ ID NO: 3981 - protein, 132 aa, Homo sapiens [sequence omitted]

SEQ ID NO: 3982 - protein, 152 aa, Homo sapiens
MRNQAPGRPKGATFPPRRPTGSRAPPLAPELRAKQRPGERVMALPVTALLLPLALLLHAARPSQFRVSPLDRTWNLGETVELKCQVLLSNPTSGCSWLFQPRGAAASPTFLLYLSQNKPKAAEGLDTQRFSGKRLGDTFVLTLSDFRRENEG

SEQ ID NO: 3983 - protein, 130 aa, Homo sapiens [sequence omitted]

SEQ ID NO: 3984 - protein, 270 aa, Homo sapiens
MSSRKQGSQPRGQQSAEEENFKKPTRSNMQKNLEPALPGRWGGRSAENPPSGSVRKTRKNKQKTPGNGDGGSTSEAPQPPRKKRARADPTVESEEAFKNRMEVKVKIPEELKPWLVEDWDLVTRQKQLFQLPAKKNVDAILEEYANCKKSQGNVDNKEYAVNEVVAGIKEYFNVMLGTQLLYKFERPQYAEILLAHPDAPMSQVYGAPHLLRLFVRIGAMLAYTPLDEKSLALLLGYLHDFLKYLAKNSASLFTASDYKVASAEYHRKAL

SEQ ID NO: 3985 - protein, 499 aa, Homo sapiens
MRHLVHMASFSAQTNMHARNLAIVWAPNLLRSKDIEASGFNGTAAFMEVRVQSIVVEFILTHVDQLFGGAALSGGEVESGWRSLPGTRASGSPEDLMPRPLPYHLPSILQAGDGPPQMRPYHTIIEIAEHKRKGSLKVRKWRSIFNLGRSGHETKRKLPRGAEDREDKSNKGTLRPAKSMGSLSAAAGASDEPEGLVGPSSPRPSPLLPESLENDSIEAAEGEQEPEAEALGGTNSEPGTPRAGRSAIRAGGSSRAERCAGVHISDPYNVNLPLHITSILSVPPNIISNVSLARLTRGLECPALQHRPSPASGPGPGPGLGPGPPDEKLEASPASSPLADSGPDDLAPALEDSLSQEVQDSFSFLEDSSSSEPEWVGAEDGEVAQAEAAGAAFSPGEDDPGMGYLEELLGVGPQVEEFSVEPPLDDLSLDEAQFVLAPSCCSVDSAGPRPEVEEENGEEVFLSAYDDLSPLLGLLLQPGWGHRSHSSEGQCLRIKAVFL

SEQ ID NO: 3986 - protein, 308 aa, Homo sapiens
MKMEEMSLSGLDNSKLEAIAQEIYADLVEDSCLGFCFEVHRAVKCGYFFLDDTDPDSMKDFEIVDQPGLDIFGQIFNQWKSKECVCPNCSRSIAASRFAPHLEKCLGMGRNSSRIANRRIANSNNMNKSESDQEDNDDINDNDWSYGSEKKAKKRKSDKNPNSPRRSKSLKHKNGELSNSDPFKYNNSTGISYETLGPEELRSLLTTQCGVISEHTKKMCTRSLRCPQHTDGQRRTVRIYFLGPSAVLPEVESSLDNDSFDMTDSQALISRLQWDGSSDLSPSDSGSSKTSENQGWGLGTNSSESRKT

SEQ ID NO: 3987 - protein, 153 aa, Homo sapiens [sequence omitted]

SEQ ID NO: 3988 - protein, 146 aa, Homo sapiens
MSHRARLLLFFLRCSLTLLPRLECSGVISAHCSRSLLGSNDSPASASQVAGITGACHHAQLIFVFLVEMGFHHVGQAGLELLTSGDPPTSASQSAGITGVSNLARPGAVTFKARRPERRLVQRSQGSEGLRPGRQEPGDMDICEGE

SEQ ID NO: 3989 - protein, 609 aa, Homo sapiens [sequence omitted]

SEQ ID NO: 3990 - protein, 175 aa, Homo sapiens [sequence omitted]

SEQ ID NO: 3991 - protein, 134 aa, Homo sapiens
MYLVALTGPSLYNPFLTSSKPPSSLPLKFLFFFNPLGLLIYHIPQVEPRDLDFSTSHGAVSATPPAPTLVSGDPWYPWYNWKQPPERELSRLRRLYQGHLQEESGPPPESMPKMPPRTPAEASSTGQTGPQSAL

SEQ ID NO: 3992 - protein, 173 aa, Homo sapiens
MLINLFSVFRTLSFVSCATQMFFFLGFAVTNCLLLGVMGYDRYAAICQPLQYAVLMSWRVCGQLIATCIISGFLISLVGTTFVFSLPFCGSNKVNHYFCDISPVIRLACADSYIGELVIFIFGVLVLVVPLIFICISYGFIVRTILKIPSAEGKQKAFSTCASHLIVVIVHYG

SEQ ID NO: 3993 - protein, 324 aa, Homo sapiens [sequence omitted]

SEQ ID NO: 3994 - protein, 306 aa, Homo sapiens
MLFGSEICKEGKCVNTQPGYECYCKQGFYYDGNLLECVDVDECLDESNCRNGVCENTRGGYRCACTPPAEYSPAQRQCLSPEEMDVDECQDPAACRPGRCVNLPGSYRCECRPPWVPGPSGRDCQLPESPAERAPERRDVCWSQRGEDGMCAGPLAGPALTFDDCCCRQGRGWGAQCRPCPPRGAGSHCPTSQSESNSFWDTSPLLLGKPPRDEDSSEEDSDECRCVSGRCVPRPGGAVCECPGGFQLDASRARCVDIDECRELNQRGPLCKSERCVNTSGSFRCVCKAGFARSRPHGACVPQRRR

SEQ ID NO: 3995 - protein, 450 aa, Homo sapiens
MILLVNLFVLLSVVCVLLNLAGFILGCQGAQFVSSVPRCDLVDLGEGKICFCCEEFQPAKCTDKENALKLFPVQPCSAVHLLLKKVLFALCALNALTTTVCLVAAALRYLQIFATRRSCIDESQISAEEAEDHGRIPDPDDFVPPVPPPSYFATFYSCTPRMNRRMVGPDVIPLPHIYGARIKGVEVFCPLDPPPPYEAVVSQMDQEQGSSFQMSEGSEAAVIPLDLGCTQVTQDGDIPNIPAEENASTSTPSSTLVRPIRSRRALPPLRTRSKSDPVLHPSEERAAPVLSCEAATQTERRLDLAAVTLRRGLRSRASRCRPRSLIDYKSYMDTKLLVARFLEQSSCTMTPDIHELVENIKSVLKSDEEHMEEAITSASFLEQIMAPLQPSTSRAHRLPSRRQPGLLHLQSCGDLHTFTPAGRPRAERRPRRVEAERPHSLIGVIRETVL

SEQ ID NO: 3996 - protein, 111 aa, Homo sapiens
MFKCLIFFVIMSGIMIVLLAESQARVDTHISNSKASALFMMCQYPPTHPWILPPPPLFYRNANTVSCVNARMYSLSLLEAWVRPLFGRMELPSFLLVSSLSPLLLQPCHGS

SEQ ID NO: 3997 - protein, 347 aa, Homo sapiens
MSTSSYNLCQQKKRRALLRASGVKKIDVEEKHELRAIRLSREDCGCDCRVFCDPDTCTCSLAGIKCQVDRMSFPCGCTKEGCSNTAGRIEFNPIRVRTHFLHTIMKLELEKNREQQIPTLNGCHSEISAHSSSMGPVAHSVEYSIADSFEIETEPQAAVLHLQSAEELDCQGEEEEEEEDGSSFCSGVTDSSTQSLAPSESDEEEEEEEEEEEEEDDDDDKGDGFVEGLGTHAEVVPLPSVLCYSDGTAVHESHAKNASFYANSSTLYYQNDSGVPCNSLYPEHRSNHPQVEFHSYLKGPSQEGFVSALNGDSHISEHPAENSLSLAEKSILHEECIKSPVVETVPV

SEQ ID NO: 3998 - protein, 111 aa, Homo sapiens [sequence omitted]

SEQ ID NO: 3999 - protein, 434 aa, Homo sapiens [sequence omitted]

SEQ ID NO: 4000 - protein, 145 aa, Homo sapiens
MKWVEMTSHWEKTMSRRYKKVRGAGAPLGFHGSFLSASAHILAKCTHPVSQHLRPLLPATQSGPLPADELCLGPASRSYGGCLVEPLASPTGKDAVPERHPVCPARPMLAPVVWGPCVPEEQPWHLSGEGVGRGPNSPTQSPSPH

SEQ ID NO: 4001 - protein, 468 aa, Homo sapiens [sequence omitted]

SEQ ID NO: 4002 - protein, 159 aa, Homo sapiens [sequence omitted]

SEQ ID NO: 4003 - protein, 169 aa, Homo sapiens
MSAPPALQIREANAHLAAVHRRAAELEARLDAAERTVHAQAERLALHDQQLRAALDELGRAKDREIATLQEQLMTSEATVHSLQATVHQRDELIRQLQPRAELLQDICRRRPPLAGLLDALAEAERLGPLPASDPGHPPPGGPGPPLDNSTGEEADRDHLQPAVFGTTV

SEQ ID NO: 4004 - protein, 266 aa, Homo sapiens [sequence omitted]

SEQ ID NO: 4005 - protein, 519 aa, Homo sapiens [sequence omitted]

SEQ ID NO: 4006 - protein, 186 aa, Homo sapiens
MSKAQCIVANEAMAPVVNSAVSDCPTLKTKLLVSDKSYDGWLDFKKLIQVAPPKQTYMRTKSQDPMAIFFTKGTTGAPKMVEYSQYGLGMGFSQASRRWMDLQPTDVLWSLGDAFGGSLSLSAVLGTWFQGACVFLCHMPTFCPETVLNVLSRFPITTLSANPEMYQELLQHKCFTRVYSVPLPKQ

SEQ ID NO: 4007 - protein, 119 aa, Homo sapiens [sequence omitted]

SEQ ID NO: 4008 - protein, 219 aa, Homo sapiens [sequence omitted]

SEQ ID NO: 4009 - protein, 107 aa, Homo sapiens
MALGFPGLGGGGSCGRQEGGRYSFPRAHAGLAQAGWASPSLSAGSRHCPHPVTPLQLFFLFPTASLVDAPSEQPCTEPRAGPGRCTLALGDSSFTETTIILWFQGGN

SEQ ID NO: 4010 - protein, 128 aa, Homo sapiens
MYIQFCITLFSFSFFFFFFFCFLRQGLPLSLRLQCSGTILAHCNLRFLGSNDPPTSASQVAWTTGVHHHISLIFVFVEMRFCCVAQVGLEYLGSSELSALDSQSAGITGVSQCAWPALCFFSFAVACY

SEQ ID NO: 4011 - protein, 167 aa, Homo sapiens [sequence omitted]

SEQ ID NO: 4012 - protein, 534 aa, Homo sapiens
MEFGVFPMEATHSSIDEEGYIQGSQRDRGSSLVDTEEAKTKSENVLHDQAAKVDKDDGKETGETFTFKRHSQDASQDVKLYSDTAPTEDLIEEVTADHPEVVTMIEETIKMSQDINFEQPYEKHAEILQEVLGEVMEENKDRFPGAPKYGGWIVDNCPIVKELWMALIKKGIIPDLVIYLSDTENNGKCLFNRIYLQKKSEIDSKILERLLEELQKKKKEEEEARKATEEELRLEEENRRLLELMKVKAKEAEETDNEVEEEIEGDELEVHEEPEASHDTRGSWLPEEFEASEVPETEPEAVSEPIEETTVETEIPKGSKEGLEIEKLSETVVLPEFPEDSYPDVPEMEPFKEKIGSFIILWKQLEATISEAYIKILNLEIADRTPQELLQKVVETMEKPFQYTAWELTGEDYEEETEDYQTEAEVDEELEEEEEEEGEDKMKERKRHLGDTKHFCPVVLKENFILQPGNTEEAAKYREKIYYFSSAEAKEKFLEHPEDYVAHEEPLKVRQYSYLNDCSHRIFLGLITNHHQFT

SEQ ID NO: 4013 - protein, 572 aa, Homo sapiens
MASSETEIRWAEPGLGKGPQRRRWAWAEDKRDVDRSSSQSWEEERLFPNATSPELLEDFRLAQQHLPPLEWDPHPQPDGHQDSESGETSGEEAEAEDVDSPASSHEPLAWLPQQGRQLDMTEEEPDGTLGSLEVEEAGESSSRLGYEAGLSLEGHGNTSPMALGHGQARGWVASGEQASGDKLSEHSEVNPSVELSPARSWSSGTVSLDHPSDSLDSTWEGETDGPQPTALAETLPEGPSHHLLSPDGRTGGSVARATPMEFQDSSAPPAQSPQHATDRWRRETTRFFCPQPKEHIWKQTKTSPKPLPSRFIGSISPLNPQPRPTRQGRPLPRQGATLAGRSSSNAPKYGRGQLNYPLPDFSKVGPRVRFPKDESYRPPKSRSHNRKPQAPARPLIFKSPAEIVQEVLLSSGEAALAKDTPPAHPITRVPQEFQTPEQATELVHQLQVSGTHGCGCVTKAPVGLGWRLIGVGRPGVEAGWGGEAWDRAWLGWEALGRRLVGWGGLGWRLARVGSPGMEASGVGRPGVGSPGVEPGGVGRPGVEAGWGRKPWDRGWWGGEAWGGGWLGQEALG

SEQ ID NO: 4014 - protein, 104 aa, Homo sapiens
MSMQRLAPKKTRKEQSANDHPIGGPEGRLFTSQLQLKFRALSERNSWLEVSRAVTPTSAAVTSTPSTSKPRQKRPTNSQSRSAAKPTPVVFLQKIINCGEEEGK

SEQ ID NO: 4015 - protein, 226 aa, Homo sapiens
MGFCYVAQAGLKLLGSSDLPTLASQSARITGMSHWAWPSLFSYFLGTCRPEIHMHLSLLPDRRTHWNVGIDFTASNGNPLDPSSLHYINPMGTNEYLSAIWAVGQIIQDYDSDKMFPALGFGAQLPPDWKQYFILLIITDGVISDMEETRHAVVQASKLPMSIIIVGVGNADFAAMEFLDGDSRMLRSHTGEEAARDIVQFVPFREFRNVSVGLGWEGAVTGSQPP

SEQ ID NO: 4016 - protein, 120 aa, Homo sapiens [sequence omitted]

SEQ ID NO: 4017 - protein, 184 aa, Homo sapiens
MTSCSMAPSTPSSSSGAKAWRRSPEAPSPWSCSSECRHNEAYTWTNPTCCVHNVIIGKLWIEQYGTVEILNHRTGHKCVLHFKPCGLFGKELHKVEGHIQDKNKKKLFMIYGKWTECLWGIDPVSYESFKKQERRGDHLRKAKLVRAGASPGRAEPWVLRAARPLLPLAHLLGSQGTFGPHQER

SEQ ID NO: 4018 - protein, 108 aa, Homo sapiens
MSTSLLICKSRSCFLVYLACVYLYGVARRDHRNACSLRQGFQTVGPSPFSKMGNQLASGHQHYTAMKQNKVGQNASCSKGKYCFVKLFTHTSKCENWLQCKTFLAGKL

SEQ ID NO: 4019 - protein, 107 aa, Homo sapiens [sequence omitted]

SEQ ID NO: 4020 - protein, 106 aa, Homo sapiens [sequence omitted]

SEQ ID NO: 4021 - protein, 115 aa, Homo sapiens [sequence omitted]

SEQ ID NO: 4022 - protein, 114 aa, Homo sapiens [sequence omitted]

SEQ ID NO: 4023 - protein, 163 aa, Homo sapiens [sequence omitted]

SEQ ID NO: 4024 - protein, 115 aa, Homo sapiens [sequence omitted]

SEQ ID NO: 4025 - protein, 102 aa, Homo sapiens [sequence omitted]

SEQ ID NO: 4026 - protein, 124 aa, Homo sapiens [sequence omitted]

SEQ ID NO: 4027 - protein, 141 aa, Homo sapiens [sequence omitted]

SEQ ID NO: 4028 - protein, 113 aa, Homo sapiens
MRYGPGKEASPRPLQAPRKVSIEGRELGKLSQQGWKEVGNPFSGSLPVKLLSSGRSCPRYRMVSSVCQSSTQNLGPCQSCTKDHTVLSSYSVVVFVTIHYLIIFKYTSCFIDF

SEQ ID NO: 4029 - protein, 360 aa, Homo sapiens
MQIIRHSEQTLKTALISKNPVLVSQYEKLDAGEQRLMNEAFQPASDLFGPITLHSPSDWITSHPEAPQDFEQFFSDPYRKTPSPNKRSIYIQSIGSLGNTRIISEEYIKWLTGYCKAYFYGLRVKLLEPVPVSVTRCSFRVNENTHNLQIHAGDILKFLKKKKPEDAFCVVGITMIDLYPRDSWNFVFGQASLTDGVGIFSFARYGSDFYSMHYKGKVKKLKKTSSSDYSIFDNYYIPEITSVLLLRSCKTLTHEIGHIFGLRHCQWLACLMQGSNHLEEADRRPLNLCPICLHKLQCAVGFSIVERYKALVRWIDDESSDTPGATPEHSHEDNGNLPKPVEAFKEWKEWIIKCLAVLQK

SEQ ID NO: 4030 - protein, 209 aa, Homo sapiens
MLGTDRCVVEEWLSEFKALPDTQITSYAATLHRKKTLVPALYKVIQDSNNELLEPVCHQLFELYRSSEVRLKRFTLQFLPELMWVYLRLTVSRDRQSNGCIEALLLGIYNLEIADKDGNNKVLSFTIPSLSKPSIYHEPSTIGSMALTEGALCQHDLIRVVYSDLHPQRETFTAQNRFEVLSFLMLCYNSAIVYMPASSYQSLCRMGSR

SEQ ID NO: 4031 - protein, 139 aa, Homo sapiens
MLEPSAKCPRQEGKYPHRGRPGDPDFRAAGEEGRGRWGALQFRSTGNPEKSSPLRGLPSPAPSLPHRALGAAAGRGDRRGREDREAKELGWGVRVWWRGWDDTGVLRGGAGRKARRPGQVGVRRSGRQERGCGRGRLGF

SEQ ID NO: 4032 - protein, 105 aa, Homo sapiens [sequence omitted]

SEQ ID NO: 4033 - protein, 111 aa, Homo sapiens
MAYGFRNIQNLVQRLKRGRCPYHYVEVMACPSGCLNGGGQLQAPDRPSRELLQHVERLYGMVRAEAPEDAPGVQELYTHWLQGTDSECAGRLLHTQYHAVEKASTGLGIRW

SEQ ID NO: 4034 - protein, 100 aa, Homo sapiens
MPLGSGHRWLHSPLAPCRCPCTLPPSRPTRDAALPWPAAVLCCGFLAVAGTGPPPPVPSGHRLQQRLGCREGYQSWENWPPCRFTEQGGSHREVSGFFLR

SEQ ID NO: 4035 - protein, 282 aa, Homo sapiens
MALSCSSWCRSPQWKFEASKSHANHRPICLSPRIWPGSASATSTVCSSSESFLPRGPPAVSLLLHGPPTVSFPPPWPTHHVLPSPVAHPPCPCLPPDMPLELPGPCCCPHCLCDSAPPSLPCPTLVQGASRPILILRAFPGPCHSVPCHDLKLQVGASPFRHGCPPSVRCPSRLIAGVPGCSVLSWSLGHSLSGIDSRVGATPGLGHSLSWVRAPPGLGHSLSGVGATPGLGHLLSGVGASPGEDTEHAAALTPCGVPPVPGCRSHSQPLSHLVSSSRCCGP

SEQ ID NO: 4036 - protein, 129 aa, Homo sapiens [sequence omitted]

SEQ ID NO: 4037 - protein, 117 aa, Homo sapiens
MGNLCSWTLKILESLHIRNVKMAWPSKGFSNSSCLQAVPQTEHYNLRSFLLAYNSDSGSPKQSIWLAIARLVNGIFYLLKTAKYCTRGRSWAAGREQQMERSLLIVLISWKTTVRRC

SEQ ID NO: 4038 - protein, 172 aa, Homo sapiens
MPQIPRDNKAAALLMLTKNVDFVKDAHEEMEQAVEECDPYSGLLNDTEENNSDNHNHEDDVLGFPSNQDLYWSEDDQELIIPCLALVRASKACLKKIRMLVAENGKKDQVAQLDDIVDISDEISPSVDDLALSIYPPMCHLTVRINVSTGFEGIATEQMGRISLITSISCKL

SEQ ID NO: 4039 - protein, 164 aa, Homo sapiens
MMKIPKGMATKAKIDKWDLIKLKSFCTAKETTIRVNRQPTKWEKNFEIYLSDKGLISRIYKELKQIYKKKTNNSIRNWAKDMNRHISKEDIYAATKHMRKSSTSLVIREMQIKTTMRHHLTSVKMAIIKKSGNNRFWRECGEIEMVLHCWWECKLVQPLWKTVW

SEQ ID NO: 4040 - protein, 134 aa, Homo sapiens
MPQPPSWDYRYAPPRLTNSNFCIFSRDRFHHVGQAGLELPTSGDPPTLASQSAGITSVSHCTPPTIIFSLISFNSFCLYDLLFSFLSSILVNIFFIVSTFICPLFSFIFTSVMVILPVFWRWCLNMFPRLDLNA

SEQ ID NO: 4041 - protein, 105 aa, Homo sapiens [sequence omitted]

SEQ ID NO: 4042 - protein, 506 aa, Homo sapiens
MIMASFFLLRRKKSKSRSRSHERKRSKSKERKRSRDRERKKSKSRERKRSRSKERRRSRSRSRDRRFRGRYRSPYSGPKFNSAIRGKIGLPHSIKLSRRRSRSKSPFRKDKSPVREPIDNLTPEERDARTVFCMQLAARIRPRDLEEFFSTVGKVRDVRMISDRNSRRSKGIAYVEFVDVSSVPLAIGLTGQRVLGVPIIVQASQAEKNRAAAMANNLQKGSAGPMRLYVGSLHFNITEDMLRGIFEPFGRIESIQLMMDSETGRSKGYGFITFSDSECAKKALEQLNGFELAGRPMKVGHVTERTDASSASSFLDSDELERTGIDLGTTGRLQLMARLAEGTGLQIPPAAQQALQMSGSLAFGAVAEFSFVIDLQTRLSQQTEASALAAAASVQPLATQCFQLSNMFNPQTEEEVGWDTEIKDDVIEECNKHGGVIHIYVDKNSAQGNVYVKCPSIAAAIAAVNALHGRWFAGKMITAAYVPLPTYHNLFPDSMTATQLLVPSRR

SEQ ID NO: 4043 - protein, 123 aa, Homo sapiens [sequence omitted]

SEQ ID NO: 4044 - protein, 132 aa, Homo sapiens [sequence omitted]

SEQ ID NO: 4045 - protein, 506 aa, Homo sapiens
MPSALAIFTCRPNSHPFQERHVYLDEPIKIGRSVARCRPAQNNATFDCKVLSRNHALVWFDHKTGKFYLQDTKSSNGTFINSQRLSRGSEESPPCEILSGDIIQFGVDVTENTRKVTHGCIVSTIKLFLPDGMEARLRSDVIHAPLPSPVDKVAANTPSMYSQELFQLSQYLQEALHREQMLEQKLATLQRLLAITQEASDTSWQALIDEDRLLSRLEVMGNQLQACSKNQTEDSLRKELIALQEDKHNYETTAKESLRRVLQEKIEVVRKLSEVERSLSNTEDECTHLKEMNERTQEELRELANKYNGAVNEIKDLSDKLKVAEGKQEEIQQKGQAEKKELQHKIDEMEEKEQELQAKIEALQADNDFTNERLTALQVRLEHLQEKTLKECSSLGIQVDDFLPKINGSTEKEKLIVEGHLTKAVEETKLSKENQTRAKESDFSDTLSPSKEKSSDDTTDAQMDEQDLNEPLAKVSLLKGTLTCFYDIVNQGIKSPFAIKSVLDIM

SEQ ID NO: 4046 - protein, 134 aa, Homo sapiens
MPPTSQLPTLDTALQTRHPWALSITRGATVSRAPLQGRVTAIVPKASCLHGTPRCFLQRGVPSWSSPQTWSWPAPSQPFQQGPRLMTAPAPHPGSGTRTSSHHPSPLRRSSLAVQVPISGEGMWEGDREGLGSK

SEQ ID NO: 4047 - protein, 203 aa, Homo sapiens [sequence omitted]

SEQ ID NO: 4048 - protein, 145 aa, Homo sapiens [sequence omitted]

SEQ ID NO: 4049 - protein, 102 aa, Homo sapiens [sequence omitted]

SEQ ID NO: 4050 - protein, 924 aa, Homo sapiens
MRSKDIEASGFNGTAAFMEVRVQSIVVEFILTHVDQLFGGAALSGGEVESGWRSLPGTRASGSPEDLMPRPLPYHLPSILQAGDGPPQMRPYHTIIEIAEHKRKGSLKVRKWRSIFNLGRSGHETKRKLPRGAEDREDKSNKGTLRPAKSMDSLSAAAGASDEPEGLVGPSSPRPSPLLPESLENDSIEAAEGEQEPEAEALGGTNSEPGTPRAGRSAIRAGGSSRAERCAGVHISDPYNVNLPLHITSILSVPPNIISNVSLARLTRGLECPALQHRPSPASSPGPGPGLGPGPPDEKLEASPASSPLADSGPDDLAPALEDSLSQEVQDSFSFLEDSSSSEPEWVGAEDGEVAQAEAAGAAFSPGEDDPGMGYLEELLGVGPQVEEFSVEPPLDDLSLDEAQFVLAPSCCSLDSAGPRPEVEEENGEEVFLSAYDDLSPLLGPKPPIWKGSGSLEGEAAGCGRQALGQGGEEQACWEVGEDKQAEPGGRLDIREEAEGSPETKVEAGKASEDRGEAGGSQETKVRLREGSREETEAKEEKSKGQKKADSMEAKGVEEPGGDEYTDEKEKEIEREEDEQREEAQVEAGRDLEQGAQEDQVAEEKWEVVQKQEAEGVREDEDKGQREKGYHEARKDQGDGEDSRSPEAATEGGAGEVSKERESGDGEAEGDQRAGGYYLEEDTLSEGSGVASLEVDCAKEGNPHSSEMEEVAPQPPQPEEMEPEGQPSPDGCLCPCSLGLGGVGMRLASTLVQVQQVRSVPVVPPKPQFAKMPSAMCSKIHVAPANPCPRPGRLDGTPGERAWESRASRSSWRNGGSLSFDAAVALARDRQRTEAQGVRRTQTCTEGGDYCLIPRTSPCSMISAHSPRPLSCLELPSEGAEGSGSRSRLSLPPREPQVPDPLLSSQRRSYAFETQANPGKGEGL

SEQ ID NO: 4051 - protein, 110 aa, Homo sapiens
MILSCINCQGDNRRCVPRPPLVSRLEESPGWCIRARQRGRPSQLHCKQFQLHSQGQAPWKRLLFNCWPFQPHCADSSFSLGYQSVPLQFTIVFVFLSFTNCDMSKLNYAI

SEQ ID NO: 4052 - protein, 151 aa, Homo sapiens
MHAGKRSPLTQSISCVCLPELGALWEIESARVNLRVSGREASREMESSPRPHRIAGVKRFLKHAGKWSLRWFLSPRWILQFRRWARKWSRFTRSSFQVRWAAVPAGKCSQHQGLSAVATASPGVFWEMEFDVSSPLTEGAGSPMSSKHAGE

SEQ ID NO: 4053 - protein, 150 aa, Homo sapiens [sequence omitted]

SEQ ID NO: 4054 - protein, 1260 aa, Homo sapiens [sequence omitted]

SEQ ID NO: 4055 - protein, 152 aa, Homo sapiens
MGFAEAFLEHLWKNLQDPSNPAIIRQAAGNYIGSFLARAKFISLITVKPCLDLLVNWLHIYLNNQDSGTKAFCDVALHGPFYSACQAVFYTFVFRHKQLLSGNLKEGLQYPQSLNFERIVMSQLNPLKICLPSVVNFFAAITKMKTCGYGWW

SEQ ID NO: 4056 - protein, 102 aa, Homo sapiens [sequence omitted]

SEQ ID NO: 4057 - protein, 143 aa, Homo sapiens [sequence omitted]

SEQ ID NO: 4058 - protein, 122 aa, Homo sapiens
MRKHIKERELSLMEQIKEFILERNTMNVPTVGKPFSGRHSLLSIREFTLGRSPMNVMNVGEPSEKKPTCMIIREFILEKNPILVRNVGKTSAEVQLLLNTREFILEINSRNREIKEFAECFS

SEQ ID NO: 4059 - protein, 132 aa, Homo sapiens
MEISAPSQQRQQIAEIEKQTKEQSQLTATQTRTVNKHGDEIITSTTSNYETQTFSSKTEWRVRAISAANLHLRTNHIYVSSDDIKETGYTYILPKNVLKKFICISDLRAQVSKWTQLGHSVCPTHFVPKTQT

SEQ ID NO: 4060 - protein, 271 aa, Homo sapiens
MAAVEKRRQAVPPPAGFTDSGRQSVSRAAGAAESEEDFLRQVGVTEMLRAALLKVLEARPEEPIAFLAHYFENMGLRSPVNGGAGEPPGQLLLQQQRLGRALWHLRLAHHSQRAAFNNNVSVAYECLSAGGRRKRPGLDGRTYSELLRRICRDGQAPEEVVAPLLRKVQCRDHEAVPLSVFRAGTLTCFVLLEFVARAGALFQLLEDSAAAVADRRVGQAVLDTLEGALQASDAAAPARFLEAGSRLAPMTREEFLERAAALFIAKVKPVG

SEQ ID NO: 4061 - protein, 167 aa, Homo sapiens [sequence omitted]

SEQ ID NO: 4062 - protein, 122 aa, Homo sapiens [sequence omitted]

SEQ ID NO: 4063 - protein, 142 aa, Homo sapiens
MPVFSASQVAGITGVHHHAGLNFFVFLVETGFLYVGQADLELPTSGDPPASASQSAGITGVSHCTRLSLVLRHLLDTPSLRAERSPRPVPRDKAQGRVYLGSRGGEGVEKAELESITLPTNHQTAGTLQPNAGRRTWRVSLC

SEQ ID NO: 4064 - protein, 160 aa, Homo sapiens [sequence omitted]

SEQ ID NO: 4065 - protein, 409 aa, Homo sapiens
MEESWEAAPGGQAGAELPMEPVGSLVPTLEQPQVPAKVRQPEGPESSPSPAGAVEKAAGAGLEPSSKKKPPSPRPGSPRVPPLSLGYGVCPEPPSPGPALVKLPRNGEAPGAEPAPSAWAPMELQVDVRVKPVGAAGGSSTPSPRPSTRFLKVPVPESPAFSRHADPAHQLLLRAPSQGGTWGRRSPLAAARTESGCDAEGRASPAEGSAGSPGSPTCCRCKELGLEKEDAALLPRAGLDGDEKLPRAVTLTGLPMYVKSLYWALAFMAVLLAVSGVVIVVLASRAGARCQQCPPGWVLSEEHCYYFSAEAQAWEASQAFCSAYHATLPLLSHTQDFLGRYPVSRHSWVGAWRGPQGWHWIDEAPLPPQLLPEDGEDNLDINCGALEEGTLVAANCSTPRPWVCAKGTQ

SEQ ID NO: 4066 - protein, 120 aa, Homo sapiens
MRCLRLRQSSLEPVAFRLPRVRKEFFQDDVFPDTAVIWEPVLSAEAWLQGANGQPWLLSLQPPDMSPVSQAPREAPARRAPSSAQYLEEKSDQQKKEEVGMGESSCAEVTESWLHLATAP

SEQ ID NO: 4067 - protein, 507 aa, Homo sapiens
MAELDQLPDESSSAKALVSLKEGSLSNTWNEKYSSLQKTPVWKGRNTSSAVEMKFTATMSTPDKKASQKIGFRLRNLLKLPKAHKWCIYEWFYSNIDKPLFEGDNDFCVCLKESFPNLKTRKLTRVEWGKIRRLMGKPRRCSSAFFEEERSALKQKRQKIRLLQQRKVADVSQFKDLPDEIPLPLVIGTKVTARLRGVHDGLFTGQIDAVDTLNATYRVTFDRTGLGTHTIPDYEVLSNEPHETMPIAAFGQKQRPSRFFMTPPRLHYTPPLQSPIIDNDPLLGQSPWRSKISGSDTETLGGFPVEFLIQVTRLSKILMIKKEHIKKLREMNTEAEKLKSYSMPISIEFQRRYATIVLELEQLNKDLNKVLHKVQQYCYELAPDQGLQPADQPTDMRRRCEEEAQEIVRHANSSTGQPCVENENLTDLISRLTAILLQIKCLAEGGDLNSFEFKSLTDSLNDIKSTIDASNISCFQNNVEIHVAHIQSGLSQMGNLHAFAANNTNRD

SEQ ID NO: 4068 - protein, 601 aa, Homo sapiens
MAALTPRKRKQDSLKCDSLLHFTENLFPSPNKKHCFYQNSDKNEENLHCSQQEHFVLSALKTTEINRLPSANQGSPFKSALSTVSFYNQNKWYLNPLERKLIKESRSTCLKTNDEDKSFPIVTEKMQGKPVCSKKNNKKPQKSLTAKYQPKYRHIKPVSRNSRNSKQNRVIYKPIVEKENNCHSAENNSNAPRVLSQKIKPQVTLQGGAAFFVRKKSSLRKSSLENEPSLGRTQKSKSEVIEDSDVETVSEKKTFATRQVPKCLVLEEKLKIGLLSASSKNKEKLIKDSSDDRVSSKEHKVDKNEAFSSEDSLGENKTISPKSTVYPIFSASSVNSKRSLGEEQFSVGSVNFMKQTNIQKNTNTRDTSKKTKDQLIIDAGQKHFGATVCKSCGMIYTASNPEDEMQHVQHHHRFLEGIKYVGWKKERVVAEFWDGKIVLVLPHDPSFAIKKVEDVQELVDNELGFQQVVPKCPNKIKTFLFISDEKRVVGCLIAEPIKQAFRVLSEPIGPESPSSTECPRAWQCSDVPEPAVCGISRIWVFRLKRRKRIARRLVDTLRNCFMFGCFLSTDEIAFSDPTPDGKLFATKYCNTPNFLVYNFNS

SEQ ID NO: 4069 - protein, 125 aa, Homo sapiens [sequence omitted]

SEQ ID NO: 4070 - protein, 179 aa, Homo sapiens
MGPAAAPGHLSSGGCCVLPLPSVLPPSISAVPGLALLPGRWTLPSQWTRRLAASAPPDRSPYLSPRLQSPVPTAAHVASFQAAARASGTSGASTVACGHGPRSFSPLSSSSRAGPRVSPQPDWLCLQMMLVTQLFVSRNAGGIAVPFSGSAAFSLAVIPPGEAHLGRFWATAVWLHSGQ

SEQ ID NO: 4071 - protein, 157 aa, Homo sapiens [sequence omitted]

SEQ ID NO: 4072 - protein, 121 aa, Homo sapiens
MSRWLWPWSNCVKERVCRYLLHHYLGHFFQEHLSLDQLSLDLYKGSVALRDIHLEIWVRSQARVQEVCERGAGVNGVTAGAGGRLRGLHRGGRALGCSAHRPLHSARVRPPAHLAAPPGSR

SEQ ID NO: 4073 - protein, 129 aa, Homo sapiens
MRSLLILSWDSWSIAFLAGNLCGQWHLCPSFAWASRSRHRCLLPARLQLDQVYCKQAASTAGTGEHGGGQKLGDTRNCRAPKRVSQACIRNLLGLGSLKGHSSSLLLSSLLLVTRNVASKGCVSALFVL

SEQ ID NO: 4074 - protein, 226 aa, Homo sapiens [sequence omitted]

SEQ ID NO: 4075 - protein, 362 aa, Homo sapiens [sequence omitted]

SEQ ID NO: 4076 - protein, 115 aa, Homo sapiens
MPLPINTIGCLLSYPKPFDTAHWKMEFMLLHGLGFATCLTFTVSMLPNSGAGAPASLHPPPFCIRQGISSPTPTASLPKCLHCQLKLPAAHFNPALTGTWKSSHHTSIFPSTSLF

SEQ ID NO: 4077 - protein, 515 aa, Homo sapiens
MVLSQEEPDSARGTSEAQPLGPAPTGAAPPPGPGPSDSPEAAVEKVEVELAGPATAEPHEPPEPPEGGWGWLVMLAAMWCNGSVFGIQNACGVLFVSMLETFGSKDDDKMVFKTAWVGSLSMGMIFFCCPIVSVFTDLFGCRKTAVVGAAVGFVGLMSSSFVSSIEPLYLTYGIIFACGCSFAYQPSLVILGHYFKKRLGLVNGIVTAGSSVFTILLPLLLRVLIDSVGLFYTLRVLCIFMFVLFLAGFTYRPLATSTKDKESGGSGSSLFSRKKFSPPKKIFNFAIFKVTAYAVWAVGIPLALFGYFVPYVHLMKHVNERFQDEKNKEVVLMCIGVTSGVGRLLFGRIADYVPGVKKVYLQVLSFFFIGLMSMMIPLCSIFGALIAVCLIMGLFDGCFISIMAPIAFELVGAQDVSQAIGFLLGFMSIPMTVGPPIAGLLRDKLGSYDVAFYLAGVPPLIGGAVLCFIPWIHSKKQREISKTTGKEKMEKMLENQNSLLSSSSGMFKKESDSII

SEQ ID NO: 4078 - protein, 165 aa, Homo sapiens [sequence omitted]

SEQ ID NO: 4079 - protein, 272 aa, Homo sapiens
MQSNMTNTVVRTTLRNDLSQEGIIHHLKILSPIYCAFQNDLLTSSGFTLEWGVYTIIEDLHGAGNFVTEMQLFIGDSPIPQNYSVSASDDVRIEVGLYRQKSNLKVVLTECWATPSSNARDPITFSFINNSCPVPNTYTNVIENGNSNKAQFKLRIFSFINNSIVYLHCKLRVCMESPGATCKINCNNFRLLQNSETSATHQMSWGPLIRSEGEPPHAEAGLGAGYVVLIVVAIFVLVAGTATLLIVRYQRMNGRYNFKIQSNNFSYQVFYE

SEQ ID NO: 4080 - protein, 133 aa, Homo sapiens [sequence omitted]

SEQ ID NO: 4081 - protein, 566 aa, Homo sapiens [sequence omitted]

SEQ ID NO: 4082 - protein, 208 aa, Homo sapiens [sequence omitted]

SEQ ID NO: 4083 - protein, 184 aa, Homo sapiens
MCRRVLSQAVWGSYGPSPEPYPTWSLGDGQQVPGHCGVCQLLGSFPGMPLGAWERWSGWAVFPAAGSGLGEAAWVGLPSDPGLSRCRFGIGRGGMGGPPSRHRIFPAASSGPGEAAWVGLPPDTGSFLLQVWDQERRHGWASLLTQVSPAAGSGLGEAMWVGLTQGLSGCRFRTGRGGVGGPPS

SEQ ID NO: 4084 - protein, 110 aa, Homo sapiens [sequence omitted]

SEQ ID NO: 4085 - protein, 329 aa, Homo sapiens [sequence omitted]

SEQ ID NO: 4086 - protein, 550 aa, Homo sapiens
MYSTDENLILSPLLGNVCFSSSQYSICFTLGSFAKIYADTFGDINYQEFAKRLWGDIYFNPKTRKFTKKAPTSSSQRSFVEFILEPLYKILAQVVGDVDTSLPRTLDELGIHLTKEELKLNIRPLLRLVCKKFFGEFTGFVDMCVQHIPSPKVGAKPKIEHTYTGGVDSDLGEAMSDCDPDGPLMCHTTKMYSTDDGVQFHAFGRVLSGTIHAGQPVKVLGENYTLEDEEDSQICTVGRLWISVARYHIEVNRVPAGNWVLIEGVDQPIVKTATITEPRGNEEAQIFRPLKFNTTSVIKIAVEPVNPSELPKMLDGLRKVNKSYPSLTTKVEESGEHVILGTGELYLDCVMHDLRKMYSEIDIKVADPVVTFCETVVETSSLKCFAETPNKKNKITMIAEPLEKGLAEDIENEVVQITWNRKKLGEFFQTKYDWDLLAARSIWAFGPDATGPNILVDDTLPSEVDKALLGSVKDSIVQGFQWGTREGPLCDECKSTSTPPPQSSRVLAARHMSGMGSPSLGFGRRSSLGYTGPSQVLGQLLPFSFLILVV

SEQ ID NO: 4087 - protein, 104 aa, Homo sapiens
MPRGVQIKKRACAQMWAQVSQRGKSSFWPSLQHALGPSNIFKIRKELFSSHQYLLCFQTIFFANLPCQCSVPPCPHTSSAGRAALETVLSIPCGERGTAAPATR

SEQ ID NO: 4088 - protein, 109 aa, Homo sapiens [sequence omitted]

SEQ ID NO: 4089 - protein, 127 aa, Homo sapiens
MNCTAPPGRGMWHAAWQLSLGLGSAGIAGVVALPAAPGRPRPGQDPRGQPDMPRLQCLPRSLLSSSGQGGRGLSQGHSQAECRNSLLKGSCASVPFPWLHTQFLCALSFFFFFPQTWSRSVTQARVQ

SEQ ID NO: 4090 - protein, 176 aa, Homo sapiens
MRGPHSSQWGSIDDGPVISGFPLKGALFGTFFYSISLFAWSHILLLFPAKESMWEFIYLFIETESHSVTQAGVQWCNLSSLQPPPPWFKQFSCLSFPSSWNYRHLPPCPANFLYFLYFFFFLRWSLSVLPKLEYSGVISAHCNFCLPGSSNSSCLSLPSRWNYRCPLPCLANFCIF

SEQ ID NO: 4091 - protein, 144 aa, Homo sapiens
MVYNNEVVGKGRNEVNQTKNATRHAEMVAIDQVLDWCRQSGKSPSEVFEHTVLYVTVEPCIMCAAALRLMKIPLVVYGCQNERFGGCGSVLNIASADLPNTGRPFQCIPGYRAEEAVEMLKTFYKQENPNAPKSKVRKKECQKS

SEQ ID NO: 4092 - protein, 176 aa, Homo sapiens
MENGQITPDGFLSKSAPSELINMTGDLMPPNQVDSLSDDFTSLSKDGLIQKPGSNAFVGGAKNCSLSVDDQKDPVASTLGAMPNTLQITPAMAQGINADIKHQLMKEVRKFGRKYERIFILLEEVQGPLEMKKQFVEFTIKEAARFKRRVLIQYLEKRHYKVHLRLPPTSDICSCM

SEQ ID NO: 4093 - protein, 326 aa, Homo sapiens
MEGHVDRSSQPTARRIINSDPVDLDLVEENTFVGPPPATSISGGSVYPTEPNCSSATFTGNLSFLASLQLSSDVSSLSPTSNNSRSSSSSSNQKAPLPCPQQDVSRPPQALPCPLRPLPCPPRASPCPPRASSCPPRALSCPSQTMQCQLPALTHPPQEVPCPRQNIPGPPQDSLGLPQDVPGLPQSILHPQDVAYLQDMPRSPGDVPQSPSDVSPSPDAPQSPGGMPHLPGDVLHSPGDMPHSSGGVTHSPRDIPHLPGDRPDFTQNDVQNRDMPMDISALSSPSCTPAWGTEQDSVSKKKKKKKRKEIPPNFLLFNLYRTRVKN

SEQ ID NO: 4094 - protein, 106 aa, Homo sapiens
MQHQFSMPTVPPPEELLDCETLIDQYLRDPNLQKRYPLALNRIAAQEVPIEIKPVNPSPLSQLQRMEPKQMFWVRARGYIGKSTPWMGGNHSPRGLPLICCVALGT

SEQ ID NO: 4095 - protein, 401 aa, Homo sapiens
MSLWKKTVYRSLCLALALLVAVTVFQRSLTPGQFLQEPPPPTLEPQKAQKPNGQLVNPNNFWKNPKDVAAPTPMASQGPQAWDVTTTNCSANINLTHQPWFQVLEPQFRQFLFYRHCRYFPMLLNHPEKCRGDVYLLVVVKSVITQHDRREAIRQTWGRERQSAGGGRGAVRTLFLLGTASKQEERTHYQQLLAYEDRLYGDILQWGFLDTFFNLTLKEIHFLKWLDIYCPHVPFIFKGDDDVFVNPTNLLEFLADRQPQENLFVGDVLQHARPIRRKDNKYYIPGALYGKASYPPYAGGGGFLMAGSLARRLHHACDTLELYPIDDVFLGMCLEVLGVQPTAHEGFKTFGISRNRNSRMNKEPCFFRAMLVVHKLLPPELLAMWGLVHSNLTCSRKLQVL

SEQ ID NO: 4096 - protein, 668 aa, Homo sapiens
MNALQSLTGGPAAGAAGIGMPPRGPGQSLGGMGSLGAMGQPMSLSGQPPPGTSGMAPHSMAVVSTATPQTQLQLQQVALQQQQQQQQFQQQQQAALQQQQQQQQQQQFQAQQSAMQQQFQAVVQQQQQLQQQQQQQQHLIKLHHQNQQQIQQQQQQLQRIAQLQLQQQQQQQQQQQQQQQQQALQAQPPIQQPPMQQPQPPPSQALPQQLQQMHHTQHHQPPPQPQQPPVAQNQPSQLPPQSQTQPLVSQAQALPGQMLYTQPPLKFVRAPMVVQQPPVQPQVQQQQTAVQTAQAAQMVAPGVQVSQSSLPMLSSPSPGQQVQTPQSMPPPPQPSPQPGQPSSQPNSNVSSGPAPSPSSFLPSPSPQPSQSPVTARTPQNFSVPSPGPLNTPVNPSSVMSPAGSSQAEEQQYLDKLKQLSKYIEPLRRMINKIDKNEDRKKDLSKMKSLLDILTDPSKRCPLKTLQKCEIALEKLKNDMAVPTPPPPPVPPTKQQYLCQPLLDAVLANIRSPVFNHSLYRTFVPAMTAIHGPPITAPVVCTRKRRLEDDERQSIPSVLQGEVARLDPKFLVNLDPSHCSNNGTVHLICKLDDKDLPSVPPLELSVPADYPAQSPLWIDRQWQYDANPFLQSVHRCMTSRLLQLPDKHSVTALLNTWAQSVHQACLSAA

SEQ ID NO: 4097 - protein, 100 aa, Homo sapiens [sequence omitted]

SEQ ID NO: 4098 - protein, 135 aa, Homo sapiens
MSSLEISSSCFSLETKLPLSPPLVEDSAFEPSRKDMDEVEEKSKDVINFTAEKLSVDEVSQLVISPLCGAISLFVGTTRNNFEGKKVISLEYEAYLPMAENEVRKICSDIRQKWPVKHIAVFHRLGYDFLYHSKS

SEQ ID NO: 4099 - protein, 488 aa, Homo sapiens [sequence omitted]

SEQ ID NO: 4100 - protein, 262 aa, Homo sapiens
MYILVYTYVYTCICIRVYVHVYGCTDVYSMYICMHVYMCTLYTVYMCVYMCTCIPVRVYIHIIYTYMYIHMHAYAYMCVFICTHMHTYVYSYARVCIHMYIHIHAYAYICIFIYTHMHTYVYSYARICIHMYIHIHAYACICMFMYAHMRAYVYSYTRICIHICIFIYTYVCMCVCSCIHVYTCVYIHIYIGMHICVYSYMHRYTYVYIHIYICIHMYTHIHIHTHNFSLTICLLMNTVCFSILATGNNASMNMAVQIYLRY

SEQ ID NO: 4101 - protein, 527 aa, Homo sapiens [sequence omitted]

SEQ ID NO: 4102 - protein, 135 aa, Homo sapiens
MGPCNQAQLCLVFVQTSNGPGRGWHFGYFCLRGFLYPDQSQPHSQWVMRVEIASSYPCFLQCLFPHPNRHTHAHTHTHTHTHTHTPSFPLLLSLGTGAPPCSPCSTQPPGRSPPTFDESPPRKKYNNLEFQLNLQ

SEQ ID NO: 4103 - protein, 136 aa, Homo sapiens [sequence omitted]

SEQ ID NO: 4104 - protein, 122 aa, Homo sapiens
MGHAGCQFKALLWKNWLCRLRNPVLFLAEFFWPCILFVILTVLRFQEPPRYRDICYLQPRDLPSCGVIPFVQSLLCNTGSRCRNFSYEGSMEHHFRLSRFQTAADPKKVNNLAFLKEIQDLA

SEQ ID NO: 4105 - protein, 132 aa, Homo sapiens [sequence omitted]

SEQ ID NO: 4106 - protein, 824 aa, Homo sapiens [sequence omitted]

SEQ ID NO: 4107 - protein, 146 aa, Homo sapiens [sequence omitted]

SEQ ID NO: 4108 - protein, 139 aa, Homo sapiens
MVLPGLTLCSGAVGTSTQWLMAALAQLSRPGRRLPPPPPCCCLVQPLHGSSSLCQREGLFHHKQHSHSHGAWFLSPVHHSQIPQLAACPLQSLRLSKPRSPGRCCAWCGCLNCEPFKWLPSPRRWPGACLKLCCTQALC

SEQ ID NO: 4109 - protein, 189 aa, Homo sapiens
MQNGADWLFPPQLYSLLERINPDHSFPVSSHCLRAAAFYVRGLFSFFQGRYNEAKRFLRETLKMSNAEDLNRLTACSLVLLGHIFYVLGNHRESNNMVVPAMQLASKIPDMSVQLWSSALLRDLNKACGNAMDAHEAAQMHQNFSQQLLQDHIEACSLPEHNLITWTDGPPPVQFQAQNGPNTSLASLL

SEQ ID NO: 4110 - protein, 851 aa, Homo sapiens [sequence omitted]

SEQ ID NO: 4111 - protein, 112 aa, Homo sapiens
MDNSVRVYPETLQETFTEAPGFFTSAPDCTSWTWAWVPVERTEEWMRHHLTGPSPLISPGTQDSLACSCCHQEEDPPGAVHGEVLRSGGFCRGGMWLLCDGLWARKDLYLPR

SEQ ID NO: 4112 - protein, 196 aa, Homo sapiens
MPEAVDVDESQLENVCLSWQNETSSGNLESCAQARRVTGGLLDRLDDSPDQCRDSITSYLKGEAGKFEANGSHTEITPEAKTKSYFPESQNDVGKQSTKETLKPKIHGSGHVEEPASPLAAYQKSLEETSKLIIEETKPCVPVSMKKMSRTSPADGKPRLSLHEEEGSSGSEQKQGEGFKVKTKKEIRHVEKKSHS

SEQ ID NO: 4113 - protein, 111 aa, Homo sapiens
MSMPASTSSHIVNFSFYKSCCQQIGLFLKPLIYIFLFLFEFSCSCGWLVGPDNGTGAAPMHCLLFFLFFSNFFFLFPFLFYTFIFFFSLLFSWRWFPPPLFLDRAGLGRGT

SEQ ID NO: 4114 - protein, 126 aa, Homo sapiens
MNISVKAVPLGLTRDLISVLCVLATSRVRISACPTAMRDTTATLGLSGESVTELHQDGALPHPSACQHCSSKEPDVTCHSRVGVILWVSSWVAPVRAVPTTPTAPESGGWHQGCLTSAPQCFSLWL

SEQ ID NO: 4115 - protein, 106 aa, Homo sapiens
MKTELPVQKGSRLPPPPPPCTSCPLPVHSWNQPGQATSGPQRQAGSSGPSRGRLEGLADRFPHPPPPVQVFAAVPRPPVTPRQITGHQARDSLLFVLSGLWLVSFS

SEQ ID NO: 4116 - protein, 213 aa, Homo sapiens
MLVGCMYVFFRKVSVRHLSKEDIYAAKKHMKKCSASLAIREMQIKTTMRCHLTPVRMAIIRKSGNNRCWRGCGEIGTLLHCCWDCKLVQPLWKSVWQFLRDLELEIPFDPAIPLLGIYPKDYKSCCYKDTCTCMFIAALFTIAKTWNPPKRPTMIDWIKKMCHIYTMEYYAAIKNDEFTSFVGTWMKLEIIILSKLSQEQKTKHHIFSLIGGN

SEQ ID NO: 4117 - protein, 137 aa, Homo sapiens [sequence omitted]

SEQ ID NO: 4118 - protein, 129 aa, Homo sapiens [sequence omitted]

SEQ ID NO: 4119 - protein, 325 aa, Homo sapiens
MLLFSLWYPLLLCKLLLTKINWRKKRKKKKEEKKREKEPEKPAKPLTAEKLQKKDQQLEPKKSTSPKKAAEPTVDLLGLDGPAVAPVTNGNTTVPPLNDDLDIFGPMISNPLPATVMPPAQATPSAPAAATLSTVTSGDLDLFTEQTTKSEEVAKKQLSKDSILSLYGTGTIQQQSTPGVFMGPTNIPFTSQAPAAFQGFPSMGVPVPAAPGLIGNVMGQSPSMMVGMPMPNGFMGNAQTGVMPLPQNVVGPQGGMVGQMGAPQSKFGLPQAQQPQWSLSQMNQQMAGMSISSATPTAGFGQPSSTTAGWSGSSSGQTLSTQLWK

SEQ ID NO: 4120 - protein, 209 aa, Homo sapiens
MPGSCAEMRTCILAGHGGSLSNLMDFVKKTGICASKWEWGTTHNFLYKHGGIRDKIMSSRKHLHLVDAGLAINTPFPLVLPPTREVHLILSFDFSAGDPFETIRATTDYCRRHKIPFPQVEEAELDLWSKAPASCYILKGETGPVVMHFPLFNIDACGGDIEAWSDTYDTFKLADTYTLDVVVLLLALAKKNVRENKKKILRELMNVAG

SEQ ID NO: 4121 - protein, 168 aa, Homo sapiens; identical to SEQ ID NO: 3334

SEQ ID NO: 4122 - protein, 118 aa, Homo sapiens
MNPQAWTGAPEEAHTLLLSLLLIFSVWLHLCHSCCTDLCMPGKAKLAQKATGHLCKVVPGAGGPATNLTCCRSAYISSSTLEVGPQCHMLFLRPLLYQSSGSNHSGCGNLAIPPSLSS

SEQ ID NO: 4123 - protein, 104 aa, Homo sapiens [sequence omitted]

SEQ ID NO: 4124 - protein, 138 aa, Homo sapiens [sequence omitted]

SEQ ID NO: 4125 - protein, 234 aa, Homo sapiens [sequence omitted]

SEQ ID NO: 4126 - protein, 103 aa, Homo sapiens
MEPRSGGLRSHKAYACIFLREPTEEREMAKTRRDRWMTTSAGQKTTLIAFMRMTASPSQKATLIASMRMTASPGQKTTLIASMSSPWGIHGEDIFEGEIPNAS

SEQ ID NO: 4127 - protein, 110 aa, Homo sapiens [sequence omitted]

SEQ ID NO: 4128 - protein, 104 aa, Homo sapiens [sequence omitted]

SEQ ID NO: 4129 - protein, 132 aa, Homo sapiens
MPSRCPGPHPSARHPPSGLPGLLGSPVFPDRQGLDVPSQPAPGPTCRSYPNALRSPALPLCFHPPSFLMVFFLPHCLSLCLSVLSVPSPPVSPSALYGPLVSLSTSLYHHVISVSLSVSISPCLCLLCLIFL

SEQ ID NO: 4130 - protein, 117 aa, Homo sapiens [sequence omitted]

SEQ ID NO: 4131 - protein, 143 aa, Homo sapiens
MMPGMATLMADSMCDDSYSSCGRQSISSSRSLPSSSCSLSHATVLLIAISDAKGTGLSVSIMGVELRERAGCLPDAPRGRHRPSAPRAKLPLSERGLIPPRLTQAEASGWGRRDRSKAGGSLCTQLQPLALSVNESLSMKLPR

SEQ ID NO: 4132 - protein, 140 aa, Homo sapiens [sequence omitted]

SEQ ID NO: 4133 - protein, 208 aa, Homo sapiens [sequence omitted]

SEQ ID NO: 4134 - protein, 159 aa, Homo sapiens
MCVRRSLVGLTFCTCYLASYLTNKYVLSVLKFTYPTLFQGWQTLIGGLLLHVSWKLGWVEINSSSRSHVLVWLPASVLFVGIIYAGSRALSRLAIPVFLTLHNVAEVIICGYQKCFQKEKTSPAKICSALFLLAAAGCLPFNDSQGLIKFYRSPRNPVH

SEQ ID NO: 4135 - protein, 942 aa, Homo sapiens [sequence omitted]

SEQ ID NO: 4136 - protein, 144 aa, Homo sapiens
MAHLRDHPFSNTRLPKPWHRDGCLGWPRRDSRSVLCGDLLSAQKLVLTLPLTGVWCFWSGLFLQGCPSVSVPMGVCPACSYREQDCWAPGMRARGWPNTEWLPAVILSVLFPPQSSWQESVLLAAFFVRIYWDLFKVPWGPRRL

SEQ ID NO: 4137 - protein, 112 aa, Homo sapiens
MLFFFFFFFFEMESCFVAQAEVQWHDLGSLLPLPPGFKQFFCLSLPSSWDCRCAPTCTTVQIPGCLFSGDGVSPCWPGWSRTPDLRWSTCFSLPGCWNCRCEPPCQTDAFYV

SEQ ID NO: 4138 - protein, 531 aa, Homo sapiens [sequence omitted]

SEQ ID NO: 4139 - protein, 270 aa, Homo sapiens [sequence omitted]

SEQ ID NO: 4140 - protein, 426 aa, Homo sapiens
MGEPGQSPSPRSSHGSPPTLSTLTLLLLLCGHAHSQCKILRCNAEYVSSTLSLRGGGSSGALRGGGGGGRGGGVGSGGLCRALRSYALCTRRTARTCRGDLAFHSAVHGIEDLMIQHNCSRQGPTAPPPPRGPALPGAGSGLPAPDPCDYEGRFSRLHGRPPGFLHCASFGDPHVRSFHHHFHTCRVQGAWPLLDNDFLFVQATSSPMALGANATATRKLTIIFKNMQECIDQKVYQAEVDNLPVAFEDGSINGGDRPGGSSLSIQTANPGNHVEIQAAYIGTTIIIRQTAGQLSFSIKVAEDVAMAFSAEQDLQLCVGGCPPSQRLSRSERNRRGAITIDTARRLCKEGLPVEDAYFHSCVFDVLISGDPNFTVAAQAALEDARAFLPDLEKLHLFPSDAGVPLSSATLLAPLLSGLFVLWLCIQ

SEQ ID NO: 4141 - protein, 128 aa, Homo sapiens
MYCQDSNICAVFAVQGGKVGRKHGIKRGRRPSIRSPAQRARGPWIHESKHPAFAKQQINLEMPNSRATTELAWVCSSTSRKKKWAGSLTLSTAPLSPPPSLVHCEDCSCLPGCHSGDLYNLAPAERTC

SEQ ID NO: 4142 - protein, 386 aa, Homo sapiens
MNGTIYSPGYPDEYPNFQDCFWLVRVPPGNGIYINFTVLQTEPIYDFITVWDGPDQNSPQIGQFSGNTALESVYSTSNQILIKFHSDFTTSGFFVLSYHAYQLRVCQPPPPVPNAEILTEDDEFEIGDIIRYQCLPGFTLVGNAILTCRLGERLQMDGAPPVCQVLCPANELRLDSTGVILSPGYPDSYPNLQMCAWSISVEKGYNITMFVEFFQTEKEFDVLQVYDGPNIQSPVLISLSGDYSSAFNITSNGHEVFLQWSADHGNNKKGFRIRYIAFYCSTPESPPHGYIISQTGGQLNSVVRWACDRGFRLVGKSSAVCRKSSYGYHAWDAPVPACQGEVYYAKMNKNMNVRLAPFNVFIWITNFSENGNIRKHIVNSFHKNKA

SEQ ID NO: 4143 - protein, 164 aa, Homo sapiens
MLVEVALCTWYLVAFPPEVVTDWHMLPTEALVHCRTRSWVSFGLAHATNATLAFLCFLGTFLVRSQPGRYNRARGLTFAMLAYFITWVSFVPLLANVQVVLRPAVQMGALLLCVLGILAAFHLPRCYLLMRQPGLNTPEFFLGGGPGDAQGQNDGNTGNQGKHE

SEQ ID NO: 4144 - protein, 136 aa, Homo sapiens
MKERDWKSSSHNTVNEELPHNCIEQPQQNDESSSKVRTSSDMNRRKSIKDHLKNAMTGNAKAQTPIFSRSKQLKDTLLSEEINVAKKTIESSSNDLGPFYSLPSKVRDLYAQFKGIEKLYGNAFCWNKKIFFLSLP

SEQ ID NO: 4145 - protein, 118 aa, Homo sapiens [sequence omitted]

SEQ ID NO: 4146 - protein, 404 aa, Homo sapiens [sequence omitted]

SEQ ID NO: 4147 - protein, 114 aa, Homo sapiens [sequence omitted]

SEQ ID NO: 4148 - protein, 112 aa, Homo sapiens [sequence omitted]

SEQ ID NO: 4149 - protein, 116 aa, Homo sapiens [sequence omitted]

SEQ ID NO: 4150 - protein, 306 aa, Homo sapiens
MDGRGAFWTVAIPRARQEGLGRLGLPFPVKRTPPAPQNPGGSTQAPQRVVGKSHSGIRMPAKSRNLRLESKLNRKVVKYKWGKQGSGAGRELVPAFPTNAGLGRRDRCRPPPAGGDVASHGLPGSGVGYSCNQREEGLRGGCGGIPHVPLFLSPLPLDASGQRPSSTYRQSLRRGLGTRAHQSPANEIPELGDLRGSRLAQEPAVLFGLRPSISKRGLLARRLWAQPMLLSGWVVSTTTTIITVTVTFTPTGLLCVKHSRGPLQPTCQESAPENRVGKGQCPSESSCRQKAGEVRSFVYLKGNKLL

SEQ ID NO: 4151 - protein, 124 aa, Homo sapiens
MAPTSTWAPGLGTGFSLGSSSSLLPTTDPHQVLSRSGPNGSLEFGPLVSSPASPFLVQAQISLTKIVQLPSRNGEFIPLILPPSFRLPTLFCSQSDLKVFLWLHSCALKLSVAPQGPQRRGRGG

SEQ ID NO: 4152 - protein, 131 aa, Homo sapiens [sequence omitted]

SEQ ID NO: 4153 - protein, 151 aa, Homo sapiens [sequence omitted]

SEQ ID NO: 4154 - protein, 110 aa, Homo sapiens
MGGVPEPFPSPLRRQQRRVGKWSGSSLGGLAQVLRNCNRKCRSWSEPMRRKPHLCIAHASWRGDIIHSHASHLSPQGPREKPQTPFSCRVWGWWCCRGRAGWGSPDFFCP

SEQ ID NO: 4155 - protein, 589 aa, Homo sapiens
MAAEKQVPGGGGGGGSGGGGGSGGGGSGGGRGAGGEENKENERPSAGSKANKEFGDSLSLEILQIIKESQQQHGLRHGDFQRYRYLLLVLMDAERAWSYAMQLKQEANTEPRKRFHLLSRLRKAVKHAEELERLCESNRVDAKTKLEAQAYTAYLSGMLRFEHQEWKAAIEAFNKCKTIYEKLASAFTEEQAVLYNQRVEEISPNIRYCAYNIGDQSAINELMQMRLRSGGTEGLLAEKLEALITQTRAKQAATMSEVEWRGRTVPVKIDKVRIFLLGLADNEAAIVQAESEETKERLFESMLSECRDAIQVVREELKPDQKQRDYILEGEPGKVSNLQYLHSYLTYIKLSTAIKRNENMAKGLQRALLQQQPEDDSKRSPRPQDLIRLYDIILQNLVELLQLPGLEEDKAFQKEIGLKTLVFKAYRCFFIAQSYVLVKKWSEALVLYDRVLKYANEVNSDAGAFKNSLKDLPDVQELITQVRSEKCSLQAAAILDANDAHQTETSSSQVKDNKPLVERFETFCLDPSLVTKQANLVHFPPGFQPIPCKPLFFDLALNHVAFPPLEDELEQKTKSGLTGYIKGIFGFRS

SEQ ID NO: 4156 - protein, 356 aa, Homo sapiens
MFSSYPLPNCYLSDITRNAGIKQDNDLDKLLLCLKISDKQTEWIENCQRQFCKMMKAKPDIISGEALIELLEKFVLHLTESPSECYFPSVEYTATDANVKNESLSSVQQLGIKMTVRYGKFLSLLKDGAENDLTWVLKHCERFLKQQQTSIKSSLLCLQGNYAGHDWFVSSLFMIMLGDKEKTFQFLHQFSRLLTSAFLWSPRLHISSYLPNDTVESGIHPVYFCSTHYIEMLLKAELPLVFSAFHMSGFAPSQICLQWITQCFWNYLDWIEICHYIATCVFLGPDYQVYICIAVFKHLQQDILQHTQTQDLQVFLKEEALHGFRVSDYFEYMEILEQNYRTVLLRDMRNIRLQST

SEQ ID NO: 4157 - protein, 137 aa, Homo sapiens [sequence omitted]

SEQ ID NO: 4158 - protein, 110 aa, Homo sapiens [sequence omitted]

SEQ ID NO: 4159 - protein, 192 aa, Homo sapiens
MACGATLKRPMEFEAALLSPGSPKRRRCAPLPGPTPGLRPPDAEPPPPFQTQTPPQSLQQPAPPGSERRLPTPEQIFQNIKQEYSRYQRWRHLEVVLNQSEACASESQPHSSALTAPSSPGSSWMKKDQPTFTLRQVGIICERLLKDYEDKIREEYEQILNTKLAEQYESFVKFTHDQIMRRYGTRPTSYVS

SEQ ID NO: 4160 - protein, 352 aa, Homo sapiens
MTAMEMSTELSMFFWKETQTRIPGRWSGRRRESQARRMVARRGRGASRGREFRGQENGLDGTKSGGPSGRGTERGRRGRGRGRGGSGRRGGRFSAQGMGTFNPADYAEPANTDDNYGNSSVSSSLNSGSSLGLSLGSNSTVTASTRSSVATTSGKAPPNLPPGVPPLLPNPYIMAPGLLHAYPPQVYGYDDLQMLQTRFPLDYYSIPFPTPTTPLTGRDGSLASNPYSGDLTKFGRGDASSPAPATTLAQPQQNQTQTHHTTQQTFLNPALPPGYSYTSLPYYTGVPGLPSTFQYGPAVFPVAPTSSKQHGVNVSVNASATPFQQPSGYGSHGYNTGRKYPPPYKHFWTAES

SEQ ID NO: 4161 - protein, 118 aa, Homo sapiens
MEALLSVQEASRCPPGFFPSSGWPRSQAWSTRSQPVQRPVACLPGPLPGLALPGDLSIIPEKWMERVMAPLKRQTSRRLEESKGSCPQRPVPAPTQPLVCPPSLLSSTLLCCPLLLTR

SEQ ID NO: 4162 - protein, 279 aa, Homo sapiens
MMLMQALVLFTLDSLDMLPAVKATWLYGIQITSLLLVCILQFFNSMILGSLLISFNLSVFIARKLQKNLKTGSFLNRLGKLLLHLFMVLCLTLFLNNIIKKILNLKSDEHIFKFLKAKFGLGATRDFDANLYLCEEAFGLLPFNTFGRLSDTLLFYAYIFVLSITVIVAFVVAFHNLSDSTNQQSVGKMEKGTVDLKPETAYNLIHTILFGFLALSTMRMKYLWTSHMCVFASFGLCSPEIWELLLKSVHLYNPKRICIMRYSVPILILLYLCYKNQKS

SEQ ID NO: 4163 - protein, 221 aa, Homo sapiens [sequence omitted]

SEQ ID NO: 4164 - protein, 458 aa, Homo sapiens [sequence omitted]

SEQ ID NO: 4165 - protein, 164 aa, Homo sapiens [sequence omitted]

SEQ ID NO: 4166 - protein, 165 aa, Homo sapiens [sequence omitted]

SEQ ID NO: 4167 - protein, 148 aa, Homo sapiens [sequence omitted]

SEQ ID NO: 4168 - protein, 153 aa, Homo sapiens
MFIFGSRRTRAGVLRVHFRLKAYTCRCATCLFSVQGVHVQVCYVFIFGSRRTRAGVLRVHFRFKAYTCRCVTCSFSAQGVHVQVCHMGKSSVTGVWCADNFVAQVISTVPDVFQSSPSSHSPPSTFSFKKKFSSQHFGRLRRADHEVRSSRSP

SEQ ID NO: 4169 - protein, 369 aa, Homo sapiens
MYSPIIYQALCEHVQTQMSLMNDLTSKNIPNGIPAVPCHAPSHSESQATPHSSYGLCTSTPVWSLQRPPCPPKVHSEVQTDGNSQFASQGKTVSATCTDVLRNSFNTSPGVPCSLPKTDISAIPTLQQLGLVNGILPQQGIHKETDLLKCIQTYLSLFRSHGKEPHLDSQTHRSPTQSQPAFLATNEEICAREQIREATSERKDLNIHVRDTKTVKDVQKAKNVNKTAEKVRIIKYLLGELKALVAEQEDSEIQRLITEMEACISVLPTVSGNTDIQVEIALAMQPLRSENAQLRRQLRILNQQLREQQKTQKPSGAVDCNLELFSLQSLNMSLQNQLEESLKSQELLQSKNEELLKVIENQKDENKKI

SEQ ID NO: 4170 - protein, 106 aa, Homo sapiens
MPQSRRQWDFEGGKGRRQAGHALRGARTHLLHPHVFRALSLWEAFFRTALVNWKRNPSPWWPCSDLDLSEVTLPLRALQSLLAGGGTSPSHSHFLTLSLCITGSLL

SEQ ID NO: 4171 - protein, 337 aa, Homo sapiens
MNEPLDYLANASDFPDYAAAFGNCTDENIPLKMHYLPVIYGIIFLVGFPGNAVVISTYIFKMRPWKSSTIIMLNLACTDLLYLTSLPFLIHYYASGENWIFGDFMCKFIRFSFHFNLYSSILFLTCFSIFRYCVIIHPMSCFSIHKTRCAVVACAVVWIISLVAVIPMTFLITSTNRTNRSACLDLTSSDELNTIKWYNLILTATTFCLPLVIVTLCYTTIIHTLTHGLQTDSCLKQKARRLTILLLLAFYVCFLPFHILRVIRIESRLLSISCSIENQIHEAYIVSRPLAALNTFGNLLLYVVVSDNFQQAVCSTVRCKVSGNLEQAKKISYSNNP

SEQ ID NO: 4172 - protein, 595 aa, Homo sapiens
MSRHEIQGKKMAYQKVHADQRAPGHSQYLDNDDLQATALDLEWDMEKELEESGFDQFQLDSAENQNLGHSETIDLNLDSIQPATSPKGRFQRLQEESDYITHYTRSAPKSNRCNFCHVLKMLCTATILFIFGILIGYYVHTNCPSDAPSSGTVDPQLYQEILKTIQAEDIKKSFRNLVQLYKNEDDTEISKKIKTQWTSLGLEDVQFVNYSVLLDLPGPSPSTVTLSSSGQCFHPNGQPCSEEARKDSSQDLLYSYAAYSAKGTLKAEVIDVSYGMADDLKRIRKIKNVTNQIALLKLGKLPLLYKLSSLEKAGFGGVLLYIDPCDLPKTVNPSHDTFMVSLNPGGDPSTPGYPSVDESFRQSRSNLTSLLVQPISASLVAKLISSPKARTKNEACSSLELPNNEIRVVSMQVQTVTKLKTVTNVVGFVMGLTSPDRYIIVGSHHHTAHSYNGQEWASSTAIITAFIRALMSKVKRGWRPDRTIVFCSWGGTAFGNIGSYERGEDFKKVLQKNVVAYISLHSPIRGNSSLYPVASPSLQQLVVEKNNFNCTRRAQCPETNISSIQIQGDADYFINHLGVPIVQFAYEDIKTLEAE

SEQ ID NO: 4173 - protein, 102 aa, Homo sapiens
MAKAPFYHLLFCFGIWSDSYSSLGLAQWRNWCSYCTGLCTPCNCDVYDCSSCFPILHFQSPRAVLSRTTKLPRIKPPNMAYPCSSDVILVASVNSVCHAVQT

SEQ ID NO: 4174 - protein, 112 aa, Homo sapiens
MIIPGKGFLVLCNPKGRNSPMGGRILLGMKKFLFPCHECPAREQGGSVREGLSSWRKWDSKSRMLRLSGSQRGGSKCGMWVALWFSGSVVVPSTADFMTPHLSPSHIVYPSV

SEQ ID NO: 4175 - protein, 712 aa, Homo sapiens
MPDQDKKVKTTEKSTDKQQEITIRDYSDLKRLRCLLNVQSSKQQLPAINFDSAQNSMTKSEPAIRAGGHRARGQWHESTEAVELENFSINYKNERNFSKHPQRKLFQEIFTALVKNRLISREWVNRAPSIHFLRVLICLRLLMRDPCYQEILHSLGGIENLAQYMEIVANEYLGYGEEQHTVDKLVNMTYIFQKLAAVKDQREWVTTSGAHKTLVNLLGARDTNVLLGSLLALASLAESQECREKISELNIVENLLMILHEYDLLSKRLTAELLRLLCAEPQVKEQVKLYEGIPVLLSLLHSDHLKLLWSIVWILVQVCEDPETSVEIRIWGGIKQLLHILQGDRNFVSDHSSIGSLSSANAAGRIQQLHLSEDLSPREIQENTFSLQAACCAALTELVLNDTNAHQVVQENGVYTIAKLILPNKQKNAAKSNLLQCYAFRALRFLFSMERNRPLFKRLFPTDLFEIFIDIGHYVRDISAYEELVSKLNLLVEDELKQIAENIESINQNKAPLKYIGNYAILDHLGSGAFGCVYKVRKHSGQNLLAMKEVNLHNPAFGKDKKDRDSSVRNIVSELTIIKEQLYHPNIVRYYKTFLENDRLYIVMELIEGAPLGEHFSSLKEKHHHFTEERLWKIFIQLCLALRYLHKEKRIVHRDLTPNNIMLGDKDKVTVTDFGLAKQKQENSKLTSVVGTILYSCVQHLYLRSPAPALAT

SEQ ID NO: 4176 - protein, 117 aa, Homo sapiens
MSRLGPPARILPSMPWKMTCSWLYVFPLNTDCTSELTEALTPSRRSPAAGWGHGGAVPHFLRAPPPHQGLLPCHGGVPLPSSSPTGVPSSPATSLVSGCPHPGHSGGEGVGGGWEPR

SEQ ID NO: 4177 - protein, 457 aa, Homo sapiens
MSDANKAAIAAEREALNLKLPPIVHLPENIGADTPTQSKLLKYRRSKEQQQKINQLVIDGAKRNLDRTLGKRTPLLPPPDYPQTMTSEMKKKGFNYIYMKQCVESSPLVPIQQEWLDHMLRLIPESLKEGKEREELLESLINEVSSDFENSMKRYLVQSVLVKPPVKSLEDEGGPLPESPVGLDYSNPWHSSYVQARNQIFSNLHIIHPTMKMLLDLGYTTFADTVLLDFTGIRAKGPIDCESLKTDLSIQTRNAEEKIMNTWYPKVINLFTKKEALEGVKPEKLDAFYSCVSTLMSNQLKDLLRRTVEGFVKLFDPKDQQRLPIFKIELTFDDDKMEFYPTFQDLEDNVLSLVERIAEALQNVQTIPSWLSGTSTPVNLDTELPEHVLHWAVDTLKAAVHRNLEGARKHYETYVEKYNWLLDGTAVENIETFQTEDHTFDEYTEELDCWVVWEVYF

SEQ ID NO: 4178 - protein, 190 aa, Homo sapiens
MLFYLSGTYYALYFLATLLMITYKSQVFSYPHRYLVLDLALLFLMGILEAVRLYLGTRGNLTEAERPLAASLALTAGTALLSAHFLLWQALVLWADWALSATLLALHGLEAVLQVVAIAAFTSHTSPFRGFGGEVRAKAGDETAGERAAEGHIRSLRPLQFYQLLPFARSAKQILALCFFPIPRFTISSP

SEQ ID NO: 4179 - protein, 215 aa, Homo sapiens
MNLACGEDVSTNGQLGPKEDTGSNTETNQILPRPSCYQTTLVQGWLLCTGQSHPIPTQALCPATLASSWPSHQAKQGRGMGMPTHPYQLCRHRTMHSSWEESDELLKAQEGPAQWSAWQGQCFSQGRDGGRLTRDPQGGRCISVLFPDNKDVSVMMSEMDVNVIAGTLKLYFRELPEPLFTDEFYPNFAEGIGEHWRPWPHGRRLLHVHCCPWRL

SEQ ID NO: 4180 - protein, 783 aa, Homo sapiens
MLSDLTLQLRQRQENTIIENPDVPQDFGNQGSTVESLCDDVVSVLTVLCEKLQAAINDSQQLQLLYLECILSVLSSSSSSMHLHRRFTDLIWKNLCPALIVILGNPIHDKTITSAHTSSTSTSLESDSASPGVSDHGRGSGCSCTAPALSGPVARTIYYIAAELVRLVGSVDSMKPVLQSLYHRVLLYPPPQHRVEAIKIMKEILGSPQRLCDLAGPSSTESESRKRSISKRKSHLDLLKLIMDGMTEACIKGGIEACYAAVSCVCTLLGALDELSQGKGLSEGQVQLLLLRLEELKDGAEWSRDSMEINEADFRWQRRVLSSEHTPWESGNERSLDISISVTTDTGQTTLEGELGQTTPEDHSGNHKNSLKSPAIPEGKETLSKVLETEAVDQPDVVQRSHTVPYPDITNFLSVDCRTRSYGSRYSESNFSVDDQDLSRTEFDSCDQYSMAAEKDSGRSDVSDIGSDNCSLADEEQTPRDCLGHRSLRTAALSLKLLKNQEADQHSARLFIQSLEGLLPRLLSLSNVEEVDTALQNFASTFCSGMMHSPGFDGNSSLSFQMLMNADSLYTAAHCALLLNLKLSHGDYYRKRPTLAPGVMKDFMKQVQTSGVLMVFSQAWIEELYHQVLDRNMLGEAGYWGSPEDNSLPLITMLTDIDGLESSAIGGQLMASAATESPFAQSRRIDDSTVAGVAFARYILVGCWKNLIDTLSTPLTGRMAGSSKELAFILGAEGIKEQNQKERDAICMSLDGLRKAARLSCALGVAANCASALAQMAAASCVQ

SEQ ID NO: 4181 - protein, 115 aa, Homo sapiens
MTDRDAQWRPLSRPLGTRPHAPLAPACVRRPWAGKAPGSVSSVSSQLPALQPPRLLVIFCFKVAFCVFFSHFSSSSSSCHIYFPPNTCPLNSIDAILSLKKCYSHTDSVWSLQLD

SEQ ID NO: 4182 - protein, 497 aa, Homo sapiens [sequence omitted]

SEQ ID NO: 4183 - protein, 568 aa, Homo sapiens
MEHLWFFLLLLVAPPRRVLSQVRLKEWGAKTWKPSETLSLVCRVDGGPFNLYSWSWIRQGSGKGLEWLGEITPGGPTHSNPSLASRVVLSVDTSKNHVSLKLLSLTVADTAVYFCAARNPSAGAAEYWGPGSPVIVSSAPTKAPDVFPIISGCRHPKDNSPVVLACLITGYHPTSVTVTWYMGTQSQPQRTFPEIQRRDSYYMTSSQLSTPLQQWRQGEYKCVVQHTASKSKKEIFRWPESPKAQASSVPTAQPQAEGSLAKATTAPATTRNTGRGGEEKKKEKEKEEQEERETKTPECPSHTQPLGVYLLTPAVQDLWLRDKATFTCFVVGSDLKDAHLTWEVAGKVPTGGVEEGLLERHSNGSQSQHSRLTLPRSLWNAGTSVTCTLNHPSLPPQRLMALREPAAQAPVKLSLNLLASSDPPEAASWLLCEVSGFSPPNILLMWLEDQREVNTSGFAPARPPPQPGSTTFWAWSVLRVPAPPSPQPATYTCVVSHEDSRTLLNASRSLEVSYLAMTPLIPQSKDENSDDYSTFDDVGSLWTTLSTFVALFILTLLYSGIVTFIKVK

SEQ ID NO: 4184 - protein, 478 aa, Homo sapiens [sequence omitted]

SEQ ID NO: 4185 - protein, 548 aa, Homo sapiens
MSAGDAVCTGWLVKSPPERKLQRYAWRKRWFVLRRGRMSGNPDVLEYYRNKHSSKPIRVIDLSECAVWKHVGPSFVRKEFQNNFVFIVKTTSRTFYLVAKTEQEMQVWVHSISQVCNLGHLEDGAADSMESLSYTPSSLQPSSASSLLTAHAASSSLPRDDPNTNAVATEETRSESELLFLPDYLVLSNCETGRLHHTSLPTRCDSWSNSDRSLEQASFDDVFVDCLQPLPSSHLVHPSCHGSGAQEVPSSRPQAALIWSREINGPPRDHLSSSPLLESSLSSTIQVDKNQGSLPCGAKELDIMSNTPPPRPPKPSHLSERRQEEWSTHSGSKKPECTLVPRRISLSGLDNMRTWKADVEGQSLRHRDKRLSLNLPCRFSPMYPTASASIEDSYVPMSPQAGASGLGPHCSPDDYIPMNSGSISSPLPELPANLEPPPVNRDLKPQRKSRPPPLDLRNLSIIREHASLTRTRTVPCSRTSFLSPERNGINSARFFANPVSREDEESYIEMKLLLSEEQRVDYVQVDEQKTQALQSTKQEWTDERQSKV

SEQ ID NO: 4186 - protein, 304 aa, Homo sapiens
MNIVFSRDSQVRVMENTVANTEKYFGQFCSLLAAYTRKTARLRDKADQLVKQLIDFANSENPELRATMRGFAEDLAKVQDYRQAQVERLETKVVNPLKLYGAQIKQTRAEIKKFKHVQNHEIKQLEKLEKLRQKSPSDQQMISQAETRVQRAAVDSSRTTLQLEETVDGFQRQKLKDLQKFFCDFVTIEMVFHAKAVEVYSSAFQTLEKYDLERDLLDFRAKMQGVYGHYDTRLLANTSPPPSVLQSLASQGTLQVQLSRANEDPEHPHANHGRFSLCEWVVKGQPAHCVCGQGGHLMLPGHSL

SEQ ID NO: 4187 - protein, 156 aa, Homo sapiens [sequence omitted]

SEQ ID NO: 4188 - protein, 121 aa, Homo sapiens
MPKELESGSHESPDDSSSTAQTLELLCHLDNTAHGNMACVVWEPMGDGKKIISLADNHILLWDLQESSSQAVLASSASLEGKGQLKFTSGRWSPHHNCTQVATANDTTLRGWDTRSMRSTA

SEQ ID NO: 4189 - protein, 230 aa, Homo sapiens
MAFVKSGWLLRQSTILKRWKKNWFDLWSDGHLIYYDDQTRQNIEDKVHMPMDCINIRTGQECRDTQPPDGKSKDCMLQIVCRDGKTISLCAESTDDCLAWKFTLQDSRTNTAYVGSAVMTDETSVVSSPPPYTAYAAPAPEVGRTLSLQQAYGYGPYGGAYPPGTQVVYAANGQAYAVPYQYPYAGLYGQQPANQVIIRERYRDNGSDLALGMLAGAATGMALGSLFWVF

SEQ ID NO: 4190 - protein, 120 aa, Homo sapiens
MKSAVITPCSHFFHAGCLKKWLYVQETCPLCHCHLKNSSQLPGLGTEPVLQPHAGAEQNVMFQEGTEPPGQEHTPGTRIQEGSRDNNEYIARRPDNQEGAFDPKEYPHSAKDEAHPVESA

SEQ ID NO: 4191 - protein, 163 aa, Homo sapiens
MRVPPAGTWALRPIWTEMGTPLRGSQAPGRIVLLLLVITPQWRWIPSKTPNVAPRSNQRCNPGGYLSGGVSLCASHSQPAALPNLGRLQKKLLQTRCKGRRMCPKAGDQTGGAFCMCDVSGGGGECVSGSGGGGESGRKTGTTSAMKDPRVLKCKLRVTNDLH

SEQ ID NO: 4192 - protein, 109 aa, Homo sapiens [sequence omitted]

SEQ ID NO: 4193 - protein, 976 aa, Homo sapiens [sequence omitted]

SEQ ID NO: 4194 - protein, 137 aa, Homo sapiens
MSTHHQNPANGPPLPPSPDAEMVMGSWRVGSEMKGTPQWAAGPIFPKPCHYLCEGGQVAEGSGCRLLYPLCLKHPPHRALVFTRFVLDSLNGNRIPWLRAKTTTYQCPCPFQLTLSSLRSSLSLWKGHPSQGRNAWS

SEQ ID NO: 4195 - protein, 173 aa, Homo sapiens
MKSRFVDSGEMSESFPYRTKALFAFEEIDGVDVCFFGMHVQEYGSDCPPPNTRYVTGHIWACPPSEGDDYIFHCHPPDQKIPKPKRLQEWYKKMLDKAFAERIIHDYKDIFKQATEDRLTSAKELPYFEGDFWPNVLEESIKELEQEEEERKKEESTAASETTEGSQGDSKNA

SEQ ID NO: 4196 - protein, 181 aa, Homo sapiens [sequence omitted]

SEQ ID NO: 4197 - protein, 1358 aa, Homo sapiens
MQDSKGRLHALTSVSREQIVGGDVQGYRWMFETQPLDQLGRSPSTIDVVRGITRQEVVAGDVGTARWLFETQPLEMIHQREQQERQKEEGKSQGDPQPEAPPKGDVQTIRWLFETCPMSELAEKQGSEVTDPTAKAEAQSCTWMFKPQPVDRPVGSREQHLQVSQVPAGERQTDRHVFETEPLQASGRPCGRRPVRYCSRVEIPSGQVSRQKEVFQALEAGKKEEQEPRVIAGSIPAGSVHKFTWLFENCPMGSLAAESIQGGNLLEEQPMSPSGNRMQESQETAAEGTLRTLHATPGILHHGGILMEARGPGELCLAKYVLSGTGQGHPYIRKEELVSGELPRIICQVLRRPDVDQQGLLVQEDPTGQLQLKPLRLPTPGSSGNIEDMDPELQQLLACGLGTSVARTGLVMQETEQGLVALTAYSLQPRLTSKASERSSVQLLASCIDKGDLSGLHSLRWEPPADPSPVPASEGAQSLHPTESIIHVPPLDPSMGMGHLRASGATPCPPQAIGKAVPLAGEAAAPAQLQNTEKQEDSHSGQKGMAVLGKSEGATTTPPGPGAPDLLAAMQSLRMATAEAQSLHQQVLNKHKQGPTPTATSNPIQDGLRKAGATQSNIRPGGGSDPRIPAAPRKVSREEQALPRGLPGGWVTIQDGIYTAHPVRTFDPPGGVQLSQREPQSRHRETALSVQAPRPLQGGPGQSTGPGREEPGGCTQMAWGPPGKAMAEVCPGGLQAAETTLKTAPLGRHILASGPQAAGASPHPHNAFVPPPPTLPAAVTGPDFPAGAHRAEDSIQQASEPLKDPLLHSHSSPAGQRTPGGSQTKTPKLDPTMPPKKKPQLPPKPAHLTQSHPPQRLPKPLPLSPSFSSEVGQREHQRGERDTAIPQPAKVPTTVDQGHIPLARCPSGHSQPSLQHGLSTTAPRPTKNQATGSNAQSSEPPKLNALNHDPTSPQWGPGPSGEQPMEGSHQGAPESPDSLQRNQKELQGLLNQVQALEKEAASSVDVQALRRLFEAVPQLGGAAPQAPAAHQKPEASVEQAFGELTRVSTEVAQLKEQTLARLLDIEEAVHKALSSMSSLQPEASARGHFQGPPKDHSAHKISVTVSSSARPSGSGQEVGGQTAVKNQAKVECHTEAQSQVKIRNHTEARGHTASTAPSTRRQETSREYLCPPRVLPSSRDSPSSPTFISIQSATRKPLETPSFKGNPDVSVKSTQLAQDIGQALLHQKGVQDKTGKKDITQCSVQPEPAPPSASPLPRGWQKSVLELQTGPGSSQHYGAMRTVTEQYEEVDQFGNTVLMSSTTVTEQAEPPRNPGSHLGLHASPLLRQFLHSPAGFSSDLTEAETVQVSCSYSQPAAQ

SEQ ID NO: 4198 - protein, 331 aa, Homo sapiens
MAEGGGPEPGEQERRSSGPRPPSARDLQLALAELYEDEVKCKSSKSNRPKATVFKSPRTPPQRFYSSEHEYSGLNIVRPSTGKIVNELFKEAREHGAVPLNEATRASGDDKSKSFTGGGYRLGSSFCKRSEYIYGENQLQDVQILLKLWSNGFSLDDGELRPYNEPTNAQFLESVKRGEIPLELQRLVHGGQVNLDMEDHQDQEYIKPRLRFKAFSGEGQKLGSLTPEIVSTPSSPEEEDKSILNAVVLIDDSVPTTKIQIRLADGSRLIQRFNSTHRILDVRNFIVQSRPEFAALDFILVTSFPNKELTDESLTLLEADILNTVLLQQLK

SEQ ID NO: 4199 - protein, 106 aa, Homo sapiens
MTFSLARIKRGGCFLAGFRNLFKWFHCPFIHPSTHPTIQPAIHPLFIQQTFSCTRELKGEGSGPWAPPACRETPLCGRRGGLCPLYPPSVPVVFRPVTCLNLSVCL

SEQ ID NO: 4200 - protein, 527 aa, Homo sapiens
MVYIVRQFLLYNVSGSVYLDQLIVLLTAKFSILRIAGSRVHHSPFSGHLDGCSFLSLQHSLHTSLDMSRHENVFLGLTLSSKSAGLKGFQLAFVPGLLQGTGGYLDGPLPTPVDNPRVGLEVGLRLSLPPLPPCPGVHIQSSQTVESSGLYTLQSILKAQLVKEDKDAQFYCELNYRLPSGNHMKESREVTVPVFYPTEKVWLEVEPVGMLKEGDRVEIRCLADGNPPPHFSISKQNPSTREAEEETTNDNGVLVLEPARKEHSGRYECQGLDLDTMISLLSEPQELLVNYVSDVRVSPAAPERQEGSSLTLTCEAESSQDLEFQWLREETGQVLERGPVLQLHDLKREAGGGYRCVASVPSIPGLNRTQLVNVAIFGPPWMAFKERKVWVKENMVLNLSCEASGHPRPTISWNVNGTASEQDQDPQRVLSTLNVLVTPELLETGVECTASNDLGKNTSILFLELVNLTTLTPDSNTTTGLSTSTASPHTRANSTSTGKPGLAREQGCARASFLPCPSPESPVQKGE

SEQ ID NO: 4201 - protein, 146 aa, Homo sapiens [sequence omitted]

SEQ ID NO: 4202 - protein, 117 aa, Homo sapiens
MIPWRRRGVLVFGIFSLLVLVFPHLPGFICLWSLMLVTFGWGFCVDIVFVDVDAIPFCFLVFLLTGRLLSCRPAGVCWRSTPDPVCLSITSRHCRTAKIAACSFLWKFRPRGAPARC

SEQ ID NO: 4203 - protein, 369 aa, Homo sapiens
MIQGRLFNMLSAVREMDKESILRKIGQAKQSIAQEANFFKFFLRRISQDDYTSRFSVSPKEVLPFAFPDCSPPQDSNELAPDGLGLVPIKSSEVQIKQSYSFFNLQVPQLYKIKRYQPFSVHKSSTSYRPQKLARALKQGAEDEVTTITALPKQDSTTQLSGKTSILSMKPPEALAMSLDYDPLYVFNPNPGLFAVMHPLTYAETLIDYHLCSHPKYKFTKESRHGSSIPVTQKQFLHHTDIIPGIMHWKSFQSLVLSSLPDPSKMETTKSCDSFNSFMLPIDVPAILDALPEEDRLETVERELCEQNVEVMLTPEMIKVEFPMLNYKDIRKEKEVKDQAQPAEKAGEKLLEEMRNLRGKALNTYLILE

SEQ ID NO: 4204 - protein, 105 aa, Homo sapiens
MPKIILCPNHKFSGLPRNHLVCIECFSKCRDAQVVGIQYIELSRCTFLEYNLNGHFPTCAIPLFSPHSIHISQTTLIIVFIIDLRKKKFERVEKTCILSPWIVNH

SEQ ID NO: 4205 - protein, 610 aa, Homo sapiens
MAELSEPEGPVDWKERCVALESQLMKFRVQASKIRELLAEKMQQLERQVIDAERQAEKAFQQVQVMEDKLKAANIQTSESETRLYNKCQDLESLIQEKDDVIQNLELQLEEQKQIRIQEAKIIEEKAAKIKEWVTVKLNELELENQNLRLINQNQTEEIRTMQSKLQVQGKKSSTVSTLKLSEGQRLSSLTFGCFLSRARSPPQVVKSEEMSKISSKEPEFTEGKDMEEMEIPEKSVDNQVLENNRGQRTLHQTPCGSEQNRKTRTSFATDGGISQNSGAPVSDWSSDEEDGSRGRSKSRCTSTLSSHTSEEGVQCSRMGSEMYLTASDDSSSIFEEETFGIKRPEHKKLYSWQQEAQWKALNSPLGKGNSELSKKEQDSSSDELNKKFQSQRLDYSSSSSEANTPSPILTPALMPKHPNSLSGKGTQLVPSSHLPPPKLRIPNVFSISVALAKRHLSQPQLSSDRMFGTNRNAISMIRPLRPQETDLDLVDGDSTEVLENMDTSCDDGLFSYDSLDSPNSDDQEHCDPAKKVAYSKPPTPPLHRFPSWESRIYAVAKSGIRMSEAFNMESVNKNSAATLSYTTSGLYTSLIYKNMTTPVYTTLRGRRPK

SEQ ID NO: 4206 - protein, 105 aa, Homo sapiens
MGGLLTPGLWCCRQPSPVYTATQPQAVGSQWPGGKQLHSPALPGCPFGFQPGSRPASTGKPVTEAWTQRWTRHLLATCDLGRSESVARSTCSAAAINSLPVSKRR

SEQ ID NO: 4207 - protein, 466 aa, Homo sapiens
MALAGTQVGPPPQERAPEPIGRAWGPPGITQPSAPGATVGRRVSVAAGPWLHGPHGSCEWVRLPGSGDRQRTDPRLGSWREGRRGAGQPGSDTVSSSGRRRPAGSTQAGRGWASLEPATALVGTWRRAHVSPHASHRGALARRPARGACAWDGSQNQRAPVRLASTVGLWESLLFIFKHLGFSTGSWLLFPQGMSLRSRTRWGSQEAAAQSLHAGKGSHLSGVGSLVVQGSAGQSLGCAITATAFLLGASTSSKTGLVPAPPAASGQGHEGRALSTWAGGTLPGGTEGAPTWAPASCPSLLPPRARWGPGFEEPRTRALPAGSWRRASGLGNRGRKNSSRPGTKGASGRTHGWPRARGVTAGRPPGPGPVRGQYGDPACRWQSVLCVWGPQHRLGGGWGRGSRSGQGLGGSGTGRGEQTGSSSGHHPGTAAPTRAAPHPWPRSPGTAGPGVSEGLSRAGTDQWSPG

SEQ ID NO: 4208 - protein, 612 aa, Homo sapiens
MLLFRDCEEATDFLTCHGLTVSDGCVELNRSAFLEPEGLSKTRKSVFITRKLTVSVGEIVNGGPLPPVPRHTPVCSFNSQNKYIGESLAAELPVSTQRPGSDTVGGGRGEECGVEPDAPLSSLPQSLPAPAPSPVPLPPVLALTPSVAPSLFQLSVQPEPPPPEPVPMYSDEDLAQVVDELIQEALQRDCEEVGSAGAAYAAAALGVSNAAMEDLLTAATTGILRHIAAEEVSKERERREQERQRAEEERLKQERELVLSELSQGLAVELMERVMMEFVRETCSQELKNAVETDQRVRVARCCEDVCAHLVDLFLVEEIFQTAKETLQELQCFCKYLQRWREAVTARKKLRRQMRAFPAAPCCVDVSDRLRALAPSAECPIAEENLARGLLDLGHAGRLGISCTRLRRLRNKTAHQMKVQHFYQQLLSDVAWASLDLPSLVAEHLPGRQEHVFWKLVLVLPDVEEQSPESCGRILANWLKVKFMGDEGSVDDTSSDAGGIQTLSLFNSLSSKGDQMISVNVCIKVAHGALSDGAIDAVETQKDLLGASGLMLLLPPKMKSEDMAEEDVYWLSALLQLKQLLQAKPFQPALPLVVLVPSPGGDAVEKEVEDGL

SEQ ID NO: 4209 - protein, 209 aa, Homo sapiens
MASMGLQVMGIALAVLGWLAVMLCCALPMWRVTAFIGSNIVTSQTIWEGLWMNCVVQSTGQMQCKVYDSLLALPQDLQAARALVIISIIVAALGVLLSVVGGKCTNCLEDESAKAKTMIVAGVVFLLAGLMVIVPVSWTAHNIIQDFYNPLVASGQKREMGASLYVGWAASGLLLLGGGLLCCNCPPRTDKPYSAKYSAARSAAASNYV

SEQ ID NO: 4210 - protein, 211 aa, Homo sapiens
MSCTIEKILTDAKTLLERLREHDAAAESLVDQSAALHRRVAAMREAGTALPDQVRQRYQEDASDMKDMSKYKPHILLSQENTQIRDLQQENRELWISLEEHQDALELIMSKYRKQMLQLMVAKKAVDAEPVLKAHQSHSAEIESQIDRICEMGEVMRKAVQVDDDQFCKIQEKLAQLELENKELRELLSISSESLQARKENSMDTASQAIK

SEQ ID NO: 4211 - protein, 122 aa, Homo sapiens
MCYLLLLLIQTAELLIHPQGLQAVSNGESALKGTRPTFSSPFILVTEGRKEWEGVFLSSGWKGNTLSNYYISLVFYYSRILQPYFYCLWGKLEMVTLIRSVWRGINGGDKIQLVLENVKVLK

SEQ ID NO: 4212 - protein, 1082 aa, Homo sapiens [sequence omitted]

SEQ ID NO: 4213 - protein, 254 aa, Homo sapiens [sequence omitted]

SEQ ID NO: 4214 - protein, 103 aa, Homo sapiens
MPSPPTASLLMQGSQPHPRALHIRFHSCKYNGPPSVLQISPAHHWASRAAACPLLRHLAGGSLPCSPCGRDPRALVPACHSPCCISLPPLPEEFLLRACSLNW

SEQ ID NO: 4215 - protein, 102 aa, Homo sapiens
MLKFSLVFLFFLFFPRRSLALSPRLEYNGMISTHCNLHLLGSSDSPASASRVARITGAHHNVWPIFCIFSRDRVSPCWPGWSITPDLVICLPQPPKVLGLQA

SEQ ID NO: 4216 - protein, 762 aa, Homo sapiens
MHNLIFQMYDEGEREINITSALAEKIKVNWTPEINKEHLLQGLLPDVQVPTSVKDMRYCQVSFQDDHVSLESAFTVRPLPDEPKHLKCEMKGGKTVQMGQELQGEVVIIITDQYGNQIQAFSPSSLSSLSIAGVGLDSSNLKTTFQENTQSISVRGIKFIPGPPGNKDLCFTWREFSDFIRVQLISGPPAKLLLIDWPELKESIPVINGRDLQNPIIVQLCDQWDNPAPVQHVKISLTKASNLKLMPSNQQHKTDEKGRANLGVFSVFAPRGEHTLQVKAIYNKSIIEGPIIKLMILPDPEKPVRLNVKYDKDASFLAGGLFTDFMISVISEDDSIIKNINPARISMKMWKLSTSGNRPPANAETFSCNKIKDNDKEDGCFYFRDKVIPNKVGTYCIQFGFMMDKTNILNSEQVIVEVLPNQPVKLVPKIKPPTPAVSNVRSVASRTLVRDLHLSITDDYDNHTGIDLVGTIIATIKGSNEEDTDTPLFIGKVRTLEFPFVNGSAEIMSLVLAESSPGRDSTEYFIVFEPRLPLLSRTLEPYILPFMFYNDVKKQQQMAALTKEKDQLSQSIVMYKSLFEASQQLLNEMKCQVEEARLKEAQLRNELKIHNIDIPTTQQVPHIEALLKRKLSEQEELKKKPRRSCTLPNYTKGSGDVLGKIAHLAQIEDDRAAMVISWHLASDMDCVVTLTTDAARRIYDETQGRQQVLPLDSIYKKTLPDWKRSLPHFRNGKLYFKPIGDPVFARDLLTFPDNVEHCETGC

SEQ ID NO: 4217 - protein, 171 aa, Homo sapiens
MKCIPYSVLLKDLEMRNLRELEDLIIEAVYTDIIQGKLDQRNQLLEVDFCIGRDIRKKDINNIVKTLHEWCDGCEAVLLGIEQQVLRANQYKENHNRTQQQVEAEIACFQREKRDVPLLNLITTAFFWLPTSRRHSKPPHPPRLRRWSSSWLNGSVPLTLSRGSPPRRCPK

SEQ ID NO: 4218 - protein, 608 aa, Homo sapiens
MRHTSEVICEVLDPEGNTFQVMADGSISTILPEKKLEDDLNEKTEGYDSLSSMHLEKNHQQIYGEHVPRFFVMYADGSGMELLRDSDIEEYLSLAYKESNTVVLQEPVQEQPGTLTITVLRPFHEASPWQVKKEDTIVPPNLRSRSWETFPSVEKKTPGPPFGTQIWKGLCIESKQLVSAPGAILKSPSVLQMRQFIQHEVIKNEVKLRLQVSLKDYINYILKKEDELQEMMVKDSRTEEERGNAADLLKLVMSFPKMEETTKSHVTEVAAHLTDLFKQSLATPPKCPPDTFGKDFFEKTWRHTASSKRWKEKIDKTRKEIETTQNYLMDIKNRIIPPFFKSELNQLYQSQYNHLDSLSKKLPSFTKKNEDANETAVQDTSDLNLDFKPHKVSEQKSSSVPSLPKPEISADKKDFTAQNQTENLTKSPEEAESYEPVKIPTQSLLQDVAGQTRKEKVKLPHYLLSSKPKSQPLAKVQDSVGGKVNTSSVASAAINNAKSSLFGFHPLPSSVKFGVLKEGHTYATVVKLKNVGVDFCRFKVKQPPPSTGLKVTYKPGPVAAGMQTELNIELFATAVGEDGAKGSAHISHNIEIMTEHEVLFLPVEANIL

SEQ ID NO: 4219 - protein, 252 aa, Homo sapiens
MSCWVHLPDGVVAGQRGFSLPSRGGRAEAPLTSRTRRLAGRGADPPPPPSRMGRLAGRGADPPPPPSRTGRLAWRGLTPTSLLDGVAAGRRRSSPPRRGGCRADRLLTSQTGRLPGGGAPHFLDGAVARRRVSSLLRWGGRAETLLTSQTGSRPGRGAPHIPDGAAGQRRSPHLRRWAAGQRRSSLPRWDGGGAETLLTFQTGQPGRGAPHVPDDGRPGRDAPHFPDGVAAGQRLQSRHFGRPRQAGGRWRL

SEQ ID NO: 4220 - protein, 101 aa, Homo sapiens [sequence omitted]

SEQ ID NO: 4221 - protein, 343 aa, Homo sapiens [sequence omitted]

SEQ ID NO: 4222 - protein, 209 aa, Homo sapiens [sequence omitted]

SEQ ID NO: 4223 - protein, 102 aa, Homo sapiens [sequence omitted]

SEQ ID NO: 4224 - protein, 885 aa, Homo sapiens
MQEAIILLALLGAMSGGEALHLILLPATGNVAENSPPGTSVHKFSVKLSASLSPVIPGFPQIVNSNPLTEAFRVNWLSGTYFEVVTTGMEQLDFETGPNIFDLQIYVKDEVGVTDLQVLTVQVTDVNEPPQFQGNLAEGLHLYIVERANPGFIYQVEAFDPEDTSRNIPLSYFLISPPKSFRMSANGTLFSTTELDFEAGHRSFHLIVEVRDSGGLKASTELQVNIVNLNDEVPRFTSPTRVYTVLEELSPGTIVANITAEDPDDEGFPSHLLYSITTVSKYFMINQLTGTIQVAQRIDRDAGELRQNPTISLEVLVKDRPYGGQENRIQITFIVEDVNDNPATCQKFTFSIMVPERTAKGTLLLDLNKFCFDDDSEAPNNRFNFTMPSGVGSGSRFLQDPAGSGKIVLIGDLDYENPSNLAAGNKYTVIIQVQDVAPPYYKNNVYVYILTSPENEFPLIFDRPSYVFDVSERRPARTRVGQVRATDKDLPQSSLLYSISTGGASLQYPNVFWINPKTGELQLVTKVDCETTPIYILRIQATNNEDTSSVTVTVNILEENDEKPICTPNSYFLALPVDLKVGTNIQNFKLTCTDLDSSPRSFRYSIGPGNVNNHFTFSPNAGSNVTRLLLTSRFDYAGGFDKIWDYKLLVYVTDDNLMSDRKKAEALVETGTVTLSIKVIPHPTTIITTTPRPRVTYQVLRKNVYSPSAWYVPFVITLGSILLLGLLVYLVVLLAKAIHRHCPCKTGKNKEPLTKKGETKTAERDVVVETIQMNTIFDGEAIDPVTGETYEFNSKTGARKWKDPLTQMPKWKESSHQGAAPRRVTAGEGMGSLRSANWEEDELSGKAWAEDAGLGSRNEGGKLGNPKNRNPAFMNRAYPKPHPGK

SEQ ID NO: 4225 - protein, 106 aa, Homo sapiens
MDNPLLKYSAKDYFFKAALCHFIVDELNVKLALEKYEEMFPAFTDSRECKLLKKLLEAHEEQNSEAYTEAVKEFDSISRLDQWLTTMLLRIKKSIQGDGEGDGDLK

SEQ ID NO: 4226 - protein, 403 aa, Homo sapiens
MNNNMSLQDAEWYWGDISREEVNEKLRDTADGTFLVRDASTKMHGDYTLTLRKGGNNKLIKIFHRDGKYGFSDPLTFSSVVELINHYRNESLAQYNPKLDVKLLYPVSKYQQDQVVKEDNIEAVGKKLHEYNTQFQEKSREYDRLYEEYTRTSQEIQMKRTAIEAFNETIKIFEEQCQTQERYSKEYIEKFKREGNEKEIQRIMHNYDKLKSRISEIIDSRRRLEEDLKKQAAEYREIDKRMNSIKPDLIQLRKTRDQYLMWLTQKGVRQKKLNEWLGNENTEDQYSLVEDDEDLPHHDEKTWNVGSSNRNKAENLLRGKRDGTFLVRESSKQGCYACSVVVDGEVKHCVINKTATGYGFAEPYNLYSSLKELVLHYQHTSLVQHNDSLNVTLAYPVYAQQRR

SEQ ID NO: 4227 - protein, 369 aa, Homo sapiens
MLWEETGAAPAPARASDLPYRISSDHLKKEEKMTMMAHQYPSWIFINEKTFITREQLNSLLKTYNIFYENQKNLHILYGETEDGKLIVEGMLDIFWGVKRPIQLKIQDEKPFSSFTSMKSSDVFSSKGMTRWGEFDDLYRISELDRTQIPMSEKRNSQEDYLSYHSNTLKPHAKDEPDSPVLYRTMSEAALVRKRMKPLMMDRKERQKNRASINGHFYNHETSIFIPAFESETKVRVNSNMRTEEVIKQLLQKFKIENSPQDFALHIIFATGEQRRLKKTDIPLLQRLLQGPSEKNARIFLMDKDAEEISSDVAQYINFHFSLLESILQRLNEEEKREIQRIVTKFNKEKAIILKCLQNKLVIKTETTV

SEQ ID NO: 4228 - protein, 116 aa, Homo sapiens [sequence omitted]

SEQ ID NO: 4229 - protein, 325 aa, Homo sapiens [sequence omitted]

SEQ ID NO: 4230 - protein, 115 aa, Homo sapiens
MHSTQDKSLHLEGDPNPSAAPTSTCAPRKMPKRISISKQLASVKALRKCSDLEKAIATTALIFRNSSDSDGKLEKAIAKDLLQTQFRNFAEPCEDSRRSWPSAKLEESTLSRHWI

SEQ ID NO: 4231 - protein, 155 aa, Homo sapiens [sequence omitted]

SEQ ID NO: 4232 - protein, 490 aa, Homo sapiens [sequence omitted]

SEQ ID NO: 4233 - protein, 1543 aa, Homo sapiens
MLETGYVITDQTRDEMSIESFLGRSSCIAEIHTDLDHTGYNEPRKNHSEWKITLKEMAQIRRKCEMFTYLRFDSEITIVVSVASKQGDNGHVVIQYMYVPPGAPIPKTRDDYTWQSGTNASVFWQQGQPYPRFTIPFMSIASAYYMFYDGYEDDNGTTYGAAVTNDMGTLCVRIVTEQQKNEVKITSRVYHKAKHISAWCPRPPRAVAYQHTYSPNFVPPTGAVQTHIKFRPNVKDVTSVMTAGPSDLYVHSSNFIYRNLHLCEPENLNDSVLISYSSDLVIYRTNTTGDDIIPTCDCTLGTYYCKHKDRYYPISVTKHQWYEIQESDYYPKHIQYNILLGVGPCKPGDCGGKLLCKHGVIGIITAGGDNHVAFIDLRDFQVAEEQGIPEYIHSLGEAFGSGFVDNIKDQIQTINPINKISSKIVKWVIRIISAITIIIRNNADPHTIIATLALLGCSGSPWRFIKEKVCGWLQLNYIHKESDGWIKKFTEMCNAARGLEWLGNKISKFIDWLKSMLPQARLKVDFIKNLKQLPLLEKQVDGLRLATQKQQQEYIDTLTLMLDSSNKFLPLYALENKRIKELLKRGQMILRTSKRTEPVGVIFHGEPGTGKSITTSILARMLTSESDIYSLPPSPKYFDGYDQQSVVIMDDIMQNPSGEDMSLFCQMVSSVPFIPPMADLPDKGKPFSSDYVLASTNHTLLHPPTITCTTAMNRRFFLDLDIIVKDDYKLGQGKLNLQCALKPCKEGKIGNAKCCPLICGKALQFRDRSNGEHLSLATIYNRITQESKNRKELTNSLQAIFQGPIDIVNKPPPPAIVDLLKSVRSPDVIRYCEENKWIIPADCRLERDLNYANVIISMIANVISIMGVIYIIYKLFCSLQGPYSGEPKPVTRKPERRVVTQGPQEEFGRSLMKHNTCVVTTNNGKFTGLGIYDNVMIIPTHADAGQEVEVDGIKTKVSDAYDLYNTQGVKLEITVLKLNRNEKFRDIRKYIPESEDDYSECCLALVANQVEPTILEVGDCCSYGNILLSGNQTARMIKYNYPTKSGFCGGVLYKIGLILGIHVGGNGRDGFSAMLLRSYFNEQQGKIVSKADVKEHNLYSIHTPTKTKLQPSVFHDVFPGSKEPAVLSTRDPRLEVDLDSSIFSKYKGNEAVKISENMLVAAAHYTAQLTTLDIDPQPISLEDSVYGIEGLEALDLHTSAGYPYTAHGIKKKDLIPKDKNLTKLKIAMEKYGLDLPMITFLKDELRKPEKISTGKTRIIEASSLNDTVQFRMAFGNLFSKFHKNPGIVTGSAVGCDPEVFWSKIPVMLDGDCLMAFDYSNYDGSLNPVWFELLERVLNDLGFPGKLVNKLCHSKHIYKTTYYEVEGGMPSGCAGTSIFNSMINNIIIRTLVLDTYKYINLDKLKILAYGDDVLFSYPYDLDMAELAKEGNKYGLTITPADKSDKFEKLNYENATFLKRGFKQDDRYKFLIHPIYPESEVWESIRWTKSPRNMQEHVLSLCHLMWHNGKDKYDSFVNKIRSVSAGRALYIPPYELLLHEWYEKF

SEQ ID NO: 4234 - protein, 366 aa, Homo sapiens
MQSVQKMFKCHPDEVMSIRTTNREYFLIGHDREKIKDWVSFMSSFRQDIKATQQNTEEELSLGNKRTLFYSSPLLGPSSTSEAVGSSSPRNGLQDKHLMEQSSPGFRQTHLQDLSEATQDVKEENHYLTPRSVLLELDNIIASSDSGESIETDGPDQVSGRIECHYEPMESYFFKETSHESVDSSKEEPQTLPETQDGDLHLQEQGSGIDWCLSPADVEAQTTNDQKGNIPDESQVEKLNVFLSPPDVINYLALTEATGRICVSQWEGPPRLGCIFCHGDHLLAVNDLKPQSLEEVSLFLTRSIQKEKLKLTIGRIPNSETFHAASCMCPSKCQSAAPSQLDKPRLNRAPKRSPAIKKSQQKGARE

SEQ ID NO: 4235 - protein, 213 aa, Homo sapiens [sequence omitted]

SEQ ID NO: 4236 - protein, 125 aa, Homo sapiens [sequence omitted]

SEQ ID NO: 4237 - protein, 331 aa, Homo sapiens
MIRKNNYTLPSRISFFCSLPTFCSNHINKSCFFFAVCIASGTKVALFNRLRSQTVSTRYLHVEGGNFHASSQQWGAFFIHLLDDDESEGEEFTVRDGYIHYGQTVKLVCSVTGMALPRLIIRKVDKQTALLDADDPVSQLHKCAFYLKDTERMYLCLSQERIIQFQATPCPKEPNKEMINDGASWTIISTDKLNGGGDVAMLELTGQNFTPNLRVWFGDVEAETMYRCGESMLCVVPDISAFREGWRWVRQPVQVPVTLVRNDGIIYSTSLTFTYTPEPGPRPHCSAAGAILRANSSQVPPNESNTNSEGSYTNASTNSTSVTSSTATVVS

SEQ ID NO: 4238 - protein, 298 aa, Homo sapiens [sequence omitted]

SEQ ID NO: 4239 - protein, 517 aa, Homo sapiens [sequence omitted]

SEQ ID NO: 4240 - protein, 426 aa, Homo sapiens [sequence omitted]

SEQ ID NO: 4241 - protein, 114 aa, Homo sapiens [sequence omitted]

SEQ ID NO: 4242 - protein, 117 aa, Homo sapiens
MLLAKHVVKHYGQQMKLSMKHQLPKMKTFHEPTTILGNSLPKCTEIKPEVNTLTAENKLWDDAKNGFARCTAAEIQRFAFSATGLLSHVEEGLDSDATDSSSDDDLDEYTLRKNVAV

SEQ ID NO: 4243 - protein, 118 aa, Homo sapiens [sequence omitted]

SEQ ID NO: 4244 - protein, 251 aa, Homo sapiens [sequence omitted]

SEQ ID NO: 4245 - protein, 139 aa, Homo sapiens [sequence omitted]

SEQ ID NO: 4246 - protein, 127 aa, Homo sapiens [sequence omitted]

SEQ ID NO: 4247 - protein, 282 aa, Homo sapiens
MRQLLSQPRSKTMCLKCDLQERLLCPSLLAGTADGSLRMDDPKGDFITLYQMASQSSASHYKLQVIKALKSSGLCESLTYGLPFILRPTSCWQLDWDELETNQQHFHALCHSLLKREWLLLAKGEPPGPGHSQRIPASTFYVIMPSHSLTLLVKAVATRELMLPSTFPLLPEDPHDDSLKNVESMLDSLELEPTYNPLHVQSHLYSHLSSIYAKPQGRLHPHWESRAPRKTGQLQTNRARATVAPLPMTPVPGRASKMPAASKSSSDAFFLPSEWEKDPSRP

SEQ ID NO: 4248 - protein, 391 aa, Homo sapiens [sequence omitted]

SEQ ID NO: 4249 - protein, 507 aa, Homo sapiens
MEFLLGNPFSTPVGQCLEKATDGSLQSEDWTLNMEICDIINETEEGPKDAIRALKKRLNGNRNYREVMLALTVLETCVKNCGHRFHILVANRDFIDSVLVKIISPKNNPPTIVQDKVLALIQAWADAFRSSPDLTGVVHIYEELKRKGVEFPMADLDALSPIHTPQRSVPEVDPAATMPRSQSQQRTSAGSYSSPPPAPYSAPQAPALSVTGPITANSEQIARLRSELDVVRGNTKVMSEMLTEMVPGQEDSSDLELLQELNRTCRAMQQRIVELISRVSNEEVTEELLHVNDDLNNVFLRYERFERYRSGRSVQNASNGVLNEVTEDNLIDLGPGSPAVVSPMVGNTAPPSSLSSQLAGLDLGTESVSGTLSSLQQCNPRDGFDMFAQTRGNSLAEQRKTVTYEDPQAVGGLASALDNRKQSSEGIPVAQPSVMDDIEVWLRTDLKGDDLEEGVTSEEFDKFLEERAKAAEMVPDLPSPPMEAPAPASNPSGRKKPERSEDALFAL

SEQ ID NO: 4250 - protein, 150 aa, Homo sapiens [sequence omitted]

SEQ ID NO: 4251 - protein, 716 aa, Homo sapiens [sequence omitted]

SEQ ID NO: 4252 - protein, 286 aa, Homo sapiens [sequence omitted]

SEQ ID NO: 4253 - protein, 107 aa, Homo sapiens
MPHPVPMITPSPVPFTAKLLESSFCTSCLLFLCSHPCSSPFQAGSHPDCLTETVLCRSPAKSLLPPPAASFCPHPLGPVSSIRGNRQHLLSCSPVMAGHVVLGRLAW

SEQ ID NO: 4254 - protein, 229 aa, Homo sapiens
MGPEQILPTGSEHVLPTGSEQILPTGSEQILPMGSEQILPMPSEQVLPMGSEHVLPTGSEQVLPTGSEQVLPTGSEHVLPTGSEQVLLPTGSDHVLPTGSEHVLSTGSEQVLPMGSEHVLPTGSEQVLPTGSMSSPRGLSMSSPWVLSKSSPWGLSKSSPRGLSKSSPWGLSKSFLCRLSTSSPSCDRVSLLQVEDVARMHLEGTPASPERPLLVAWGVAGWSGVLGAL

SEQ ID NO: 4255 - protein, 105 aa, Homo sapiens [sequence omitted]

SEQ ID NO: 4256 - protein, 110 aa, Homo sapiens [sequence omitted]

SEQ ID NO: 4257 - protein, 278 aa, Homo sapiens; identical to SEQ ID NO: 3234

SEQ ID NO: 4258 - protein, 327 aa, Homo sapiens; identical to SEQ ID NO: 3576

SEQ ID NO: 4259 - protein, 118 aa, Homo sapiens [sequence omitted]

SEQ ID NO: 4260 - protein, 197 aa, Homo sapiens
MGGAGGQHGTDLHPALQTGTTARPCCWMVSSVWAPSWNTTQSTATGTALTEARGPACPGPLSLKPRLVPPTCCVMVWLPRPSLGWVWGWSGLAHASHLCLHLCCHPAPPSSSSPASSSLCASVSCRKKWVEPERRLSEEGRGRAWGGSPTPHPKPQGLPPGSGRGRSWLCGVVAPLLLPCFSHLSCPSLVPTAVHHE

SEQ ID NO: 4261 - protein, 461 aa, Homo sapiens
MSREGAGAALVAEVIKDRLCFAILYSRPKSASNVHYFSIDNELEYENFYADFGPLNLAMVYRYCCKINKKLKSITMLRKKIVHFTGSDQRKQANAAFLVGCYMVIYLGRTPEEAYRILIFGETSYIPFRDAAYGSCNFYITLLDCFHAVKKAMQYGFLNFNSFNLDEYEHYEKAENGDLNWIIPDRFIAFCGPHSRARLESGYHQHSPETYIQYFKNHNVTTIIRLNKRMYDAKRFTDAGFDHHDLFFADGSTPTDAIVKEFLDICENAEGAIAVHCKAGLGRTGTLIACYIMKHYRMTAAETIAWVRICRPGSVIGPQQQFLVMKQTNLWLEGDYFRQKLKGQENGQHRAAFSKLLSGVDDISINGVENQDQQEPEPYSDDDEINGVTQGDRLRALKSRRQSKTNAIPLTVILQSSVQSCKTSEPNISGSAGITKRTTRSASRKSSVKSLSISRTKTVLR

SEQ ID NO: 4262 - protein, 296 aa, Homo sapiens
MPAVSKGDGMRGLAVFISDIRNCKSKEAEIKRINKELANIRSKFKGDKALDGYSKKKYVCKLLFIFLLGHDIDFGHMEAVNLLSSNKYTEKQIGYLFISVLVNSNSELIRLINNAIKNDLASRNPTFMCLALHCIANVGSREMGEAFAADIPRILVAGDSMDSVKQSAALCLLRLYKASPDLVPMGEWTARVVHLLNDQHMGVVTAAVSLITCLCKKNPDDFKTCVSLAVSRLSRIVSSASTDLQDYTYYFVPAPWLSVKLLRLLQCYLNYHSPVRGFHIWWEPSPTAHSHNSQCV

SEQ ID NO: 4263 - protein, 115 aa, Homo sapiens
MVSKSAVDFGLEEHKHNLYPKLFYPFANFLLLDLSTKSVVLLLSLQLVSVHAVQLLITSGLWAGSKNLKLIMLDSGASVGLHIVYFPPSPSATAVLGRDSFFPLWLVLENCMGYR

SEQ ID NO: 4264 - protein, 307 aa, Homo sapiens [sequence omitted]

SEQ ID NO: 4265 - protein, 132 aa, Homo sapiens [sequence omitted]

SEQ ID NO: 4266 - protein, 160 aa, Homo sapiens [sequence omitted]

SEQ ID NO: 4267 - protein, 270 aa, Homo sapiens
MSSTQFNKGPSYGLSAEVKNRLLSKYDPQKEAELRTWIEGLTGLSIGPDFQKGLKDGTILCTLMNKLQPGSVPKINRSMQNWHQLENLSNFIKAMVSYGMNPVDLFEANDLFESGNMTQVQVSLLALAGKMGTNKCASQSGMTAYGTRRHLYDPKNHILPPMDHSTISLQMGTNKCASQVGMTAPGTRRHIYDTKLGTDKCDNSSMSLQMGYTQGANQSGQVFGLGRQIYDPKYCPQGTVADGAPSGTGDCPDPGEVPEYPPYYQEEAGY

SEQ ID NO: 4268 - protein, 410 aa, Homo sapiens
MGNVVTCELSVEKVCDEDGEAKELDYQATLLEDQAPAHFHRNFPEQVFQDLQRKSPESEILSLHLLVEELRLNPDGVETVNDTKPELNVASSEGGEMERRDSDSFLNIFPEKQVTKAGNTEPVLEEWIPVLQRPSRTAAVPTVKDALDAALPSPEEGTSIAAVPAPEGTAVVAALVPFPHEDILVASIVSLEEEDVTAAAVSAPERATVPAVTVSVPEGTAAVAAVSSPEETAPAVAAAITQEGMSAVAGFSPEWAALAITVPITEEDGTPEGPVTPATTVHAPEEPDTAAVRVSTPEEPASPAAAVPTPEEPTSPAAAVPTPEEPTSPAAAVPPPEEPTSPAAAVPTPEEPTSPAAAVPTPEEPTSPAAAVPTPEEPTSPAAAVPTPEEPASPAAAVPTPEIQCGWWGW

SEQ ID NO: 4269 - protein, 117 aa, Homo sapiens
MLVLAWKLDAQNMGYFTLQEWLKGMTSLQCDTTEKLRNTLDYLRSFLNDSTNFKLIYRYAFDFARQSKYKVINKDQWCNVLEFSRTINLDLSNYDEDGAWPVLLDEFVEWYKDKQMS

SEQ ID NO: 4270 - protein, 630 aa, Homo sapiens
MVVVIAVSVYCYWRKSQQAEREYEKIKSQLEGLEESVRDRCKKEFTDLMIEMEDQTNDVHEAGIPVLDYKTYTDRVFFLPSKDGDKDVMITGKLDIPEPRRPVVEQALYQFSNLLNSKSFLINFIHTLENQREFSARAKVYFASLLTVALHGKLEYYTDIMHTLFLELLEQYVVAKNPKLMLRRSETVVERMLSNWMSICLYQYLKDSAGEPLYKLFKAIKHQVEKGPVDAVQKKAKYTLNDTGLLGDDVEYAPLTVSVIVQDEGVDAIPVKVLNCDTISQVKEKIIDQVYRGQPCSCWPRPDSVVLEWRPGSTAQILSDLDLTSQREGRWKRVNTLIHYNVRDGATLILSKVGVSQQPEDSQQDLPGERHALLEEENRVWHLVRPTDEVDEGKSKRGSVKEKERTKAITEIYLTRLLSVKGTLQQFVDNFFQSVLAPGHAVPPAVKYFFDFLDEQAEKHNIQDEDTIHIWKTNSLPLRFWVNILKNPHFIFDVHVHEVVDASLSVIAQTFMDACTRTEHKLSRDSPSNKLLYAKEISTYKKMVEDYYKGIRQMVQVSDQDMNTHLAEISRAHTDSLNTLVALHQLYQYTQKYYDEIINALEEDPAAQKMQLAFRLQQIAAALENKVTDL

SEQ ID NO: 4271 - protein, 156 aa, Homo sapiens
MGHGDGDMGPCRLHKAKWKSRFFTVNVGRPFFFPGCLTYYCRSAHIHSFPSVLWQDDIIDDVDSFLAAAETLKERGAYKIFVMATHGLLSSDAPRRIEESAIDEVVVTNTIPHEVQKLQCPKIKTVDISMILSEAIRRIHNGESMSYLFRNIGLDD

SEQ ID NO: 4272 - protein, 138 aa, Homo sapiens [sequence omitted]

SEQ ID NO: 4273 - protein, 522 aa, Homo sapiens [sequence omitted]

SEQ ID NO: 4274 - protein, 191 aa, Homo sapiens [sequence omitted]

SEQ ID NO: 4275 - protein, 131 aa, Homo sapiens
MLDILVYEEQQQAAAGEAGPCLEYLLQHKILETLCTLGKAEVGGPLRAGPGRGGRPLRAWPGRGGRPLCAGPGRGGRPSECWARLRWAVGSGQPGAPWIPGLSAYALPSPDTESGSSGERSKQDGHCGCLT

SEQ ID NO: 4276 - protein, 357 aa, Homo sapiens [sequence omitted]

SEQ ID NO: 4277 - protein, 113 aa, Homo sapiens
MPQLGFVPILFCLCRKSVSNHSGPVQCFWMKQNCETHTALSTCLPWGESHINIIVSYLHIYPCSCGWQQPRDKRQIKSARVSLARKGRVQVTLKGQETHSRWGIPGVPGIGPE

SEQ ID NO: 4278 - protein, 102 aa, Homo sapiens [sequence omitted]

SEQ ID NO: 4279 - protein, 113 aa, Homo sapiens
MVSNTCCRLHVELSLISPRVGMSRGGLMFLPLTLLSSPGQDFEWRVWGILLAVALGTLATPFALPCVVGQYLEWSGQTRETYRRSRGHSDAHRPLSVGRLGCDLFRRSGVHTV

SEQ ID NO: 4280 - protein, 102 aa, Homo sapiens [sequence omitted]

SEQ ID NO: 4281 - protein, 169 aa, Homo sapiens [sequence omitted]

SEQ ID NO: 4282 - protein, 285 aa, Homo sapiens [sequence omitted]

SEQ ID NO: 4283 - protein, 121 aa, Homo sapiens [sequence omitted]

SEQ ID NO: 4284 - protein, 119 aa, Homo sapiens [sequence omitted]

SEQ ID NO: 4285 - protein, 169 aa, Homo sapiens [sequence omitted]

SEQ ID NO: 4286 - protein, 168 aa, Homo sapiens [sequence omitted]

SEQ ID NO: 4287 - protein, 495 aa, Homo sapiens
MHHWCIPFSVDGQPAPSLRWLFNGSVLNETSFIFTEFLEPAANETVRHGCLRLNQPTHVNNGNYTLLAANPFGQASASIMAAFMDNPFEFNPEDPIPDTNSTSGDPVEKKDETPFGVSVAVGLAVFACLFLSTLLLVLNKCGRRNKFGINRPAVLAPEDGLAMSLHFMTLGGSSLSPTEGKGSGLQGHIIENPQYFSDACVHHIKRRDIVLKWGLGEGAFGKVFLAECHNLLPEQDKMLVAVKALKEASESARQDFQREAELLTMLQHQHIVRFFGVCTEGRPLLMVFEYMRHGDLNRFLRSHGPDAKLLAGGEDVAPGPLGLGQLLAVASQVAAGMVYLAGLHFVHRDLATRNCLVGQGLVVKIGDFGMSRDIYSTDYYRVGGRTMLPIRWMPPESILYRKFTTESDVWSFGVVLWEIFTYGKQPWYQLSNTEAIDCITQGRELERPRACPPEVYAIMRGCWQREPQQRHSIKDVHARLQALAQAPPVYLDVLG

SEQ ID NO: 4288 - protein, 252 aa, Homo sapiens
MPILQALCLLPKVSTPSITVPSPQRSAALSITVPSPQRSAAPSITVPSPQRSAPRASLCPPHKGQHPEHHCALPPKGQHPEHHCALPTKVSTPSITVPSPQRSPQMSLSSAARGSNTDVAGLSVGEWPGWQLWGEGQDGAQQRPHLPSGGSGAGVAPQRLPKSRACILCSRHGAQGPWVTGRSVSHSHCPIQGLLDLQRPDLGTDWGRTRPLCTPQDLCGGRPLPSTWGVTMHLIHCLSVSLSLCLSLSHCV

SEQ ID NO: 4289 - protein, 113 aa, Homo sapiens
MMFLMNTSPCPFFFFFRWSLALSPRLECSGTISGHCNLRPPASSDSPVSASRVARITGARHQAWLIFIFLVEMGFCLVGQAGLKLLTSGDPSTLASQSAGTTGVSHHAWSPTC

SEQ ID NO: 4290 - protein, 122 aa, Homo sapiens
MSYGRPPPDVEGMTSLKVDNLTYRTSPDTLRRVFEKYGRVGDVYIPRDRYTKESRGFAFVRGPGPGLGPGVLPQCPRGNPNPGRDRRVPPSLLKRKERCPLKKMVMSGNPRHITLIHKWDLG

SEQ ID NO: 4291 - protein, 372 aa, Homo sapiens
MEPGRRGAAALLALLCVACALRAGRAQYERYSFRSFPRDELMPLESAYRHALDKYSGEHWAESVGYLEISLRLHRLLRLFGGLLRRAHCLKRCKQGLPAFRQSQPSREVLADFQRREPYKFLQFAYFKANNLPKAIAAAHTFLLKHPDDEMMKRNMAYYKSLPGAEDYIKDLETKSYESLFIRAVRAYNGENWRTSITDMELALPDFFKAFYECLAACEGSREIKDFKDFYLSIADHYVEVLECKIQCEENLTPVIGGYPVEKFVATMYHYLQFAYYKLNDLKNAAPCAVSYLLFDQNDKVMQQNLVYYQYHRDTWGLSDEHFQPRPEAVQFFNVTTLQKELYDFAKENIMDDDEGEVVEYVDDLLELEETS

SEQ ID NO: 4292 - protein, 230 aa, Homo sapiens
MRVFIQICFSYFLVDSAGQVVANQEGVFRSNCMDCLDRTNVIQSLLARRSLQAQLQRLGVLHVGQKLEEQDEFEKIFKNAWADNANACAKQYAGTGALKTDFTRTGKRTHLGLIMDGWNSMIRYYKNNFSDGFRQDSIDLFLGNYSVDELESHSPLSVPRDWKFLALPIIMVVAFSMCIICLLMAGDTWTETLAYVLFWGVASIGTFFIILYNGKDFVDAPRLVQKEKID

SEQ ID NO: 4293 - protein, 106 aa, Homo sapiens
MFHLQPREAQKSSSALEVHKKYGDSTGTTLEEAQKINNGSSQADGTLKPVDEKEEAVAAEVGWMTSVKDWAGVMISAQTLTGRVLVVLVFALSIGALVIYFIDSSK

SEQ ID NO: 4294 - protein, 151 aa, Homo sapiens [sequence omitted]

SEQ ID NO: 4295 - protein, 229 aa, Homo sapiens
MAQGDAAATAGHAQLHCGHETSEGCVSPPGVTVPWPTQGERPVGPNAEERKRRATLQWGRGAKKGPRNPTPENSRRLGRQGALVQERSFKKFGARRALNSPVKKTEQQFGGTRLPGHNGRTEARDREPLRRRPTPLTIHRFPGGEAPKHIGSWLYSAAVPRPKSRPASCCPHSLRHRPLTSSPRSSQSCCQLFGVHRQRPIRAGLRGRHASEGRKRRGGGRVREPRRLQ

SEQ ID NO: 4296 - protein, 125 aa, Homo sapiens
MCPRLAEVLPLNAAGQDATLSTISSVPGIPPTHTHIHSLLLTSSHTLTHPTTLTHFQNPPTLTLTLASPFPCSVTSLQVPAPHSLLQSQPPWCQPSLVPAISPKYPPFWAPFCPEGPEVSLGSTC

SEQ ID NO: 4297 - protein, 188 aa, Homo sapiens [sequence omitted]

SEQ ID NO: 4298 - protein, 518 aa, Homo sapiens [sequence omitted]

SEQ ID NO: 4299 - protein, 163 aa, Homo sapiens [sequence omitted]

SEQ ID NO: 4300 - protein, 154 aa, Homo sapiens [sequence omitted]

SEQ ID NO: 4301 - protein, 155 aa, Homo sapiens
MLGCFMDLLSILMIQDILSMPVLFSLGLCFHSKLLRCSPNPGENKIHYQIQQVQPSWSSLRSHRVAPWNDASLCQGPPFGIGRVLGRILHLQRPLGSLRSGGGWTQKGRLNTRWGRKNVTIGSQTEASPLKYGVGGLTSALWNVLSDCCRVPGPP

SEQ ID NO: 4302 - protein, 443 aa, Homo sapiens
MSQRDGVCGSHEVAGAASPGADGGLSLAAYCKNSVDGLWYCFDDSDVQQLSEDEVCTQTAYILFYQRRTAIPSWSANSSVAGSTSSSLCEHWVSRLPGSKPASVTSAASSRRTSLASLSESVEMTGERSEDDGGFSTRPFVRSVQRQSLSSRSSVTSPLAVNENCMRPSWSLSAKLQMRSNSPSRFSGDSPIHSSASTLEKIGEAADDKVSISCFGSLRNLSSSYQEPSDSHSRREHKAVGRAPLAVMEGVFKDESDTRRLNSSVVDTQSKHSAQGDRLPPLSGPFDNNNQIAYVDQSDSVDSSPVKEVKAPSHPGSLAKKPESTTKRSPSSKGTSEPEKSLRKGRPALASQESSLSSTSPSSPLPVKVSLKPSRSRSKADSSSRGSGRHSSPAPAQTQFPSGEPGPSRGGQGGREARAELLHGQPALPQHKHQVWFEEGQQV

SEQ ID NO: 4303 - protein, 156 aa, Homo sapiens [sequence omitted]

SEQ ID NO: 4304 - protein, 172 aa, Homo sapiens
MSSGNYQQSEALSKPTFSEEQASALVESVFGLKVSKVRPLPSYDDQNFHVYVSKTKDGPTEYVLKISNTKASKNPDLIEVQNHIIMFLKAAGFPTASVCHTKGDNTASLVSVDSGSEIKSYLVRLLTYLPGRPIAELPVSPQLLYEIGKLAAKLDKTLQEGKPRVTPLLAKN

SEQ ID NO: 4305 - protein, 150 aa, Homo sapiens
MLQFPLDLAVQNVVCPVSVTERGFPSLFFCQYSADLWNIGISVFIQDGPFLVVRLILMTYFKVINQMLVFFAAKNFLVVVLQLYRLVVLALAVRASLRSQSEGLKGEHGCRAQTSESGPSQRDWQNESKEGLAIPLRGSPVTSDDSHHTP

SEQ ID NO: 4306 - protein, 803 aa, Homo sapiens
MAERGGDGGESERFNPGELRMAQQQALRFRGPAPPPNAVMRGPPPLMRPPPPFGMMRGPPPPPRPPFGRPPFILICRQYLQRPPFMPPPMSSMPPPPGMMFPPGMPPVTAPGTPALPPTEEIWVENKTPDGKVYYYNARTRESAWTKPDGVKVIQQSELTPMLAAQAQVQAQAQAQAQAQAQAQAQAQAQAQAQAQAQAQAQAQAQAQAQAQAQAQAQAQAQAQAQAQVQAQVQAQVQAQAVGASTPTTSSPAPAVSTSTSSSTPSSTTSTTTTATSVAQTVSTPTTQDQTPSSAVSVATPTVSVSTPAPTATPVQTVPQPHPQTLPPAVPHSVPQPTTAIPAFPPVMVPPFRVPLPGMPIPLPGVLPGMAPPIVPMIHPQVAIAASPATLAGATAVSEWTEYKTADGKTYYYNNRTLESTWKKPQELKEKEKLEEKIKEPIKEPSEEPIKEIKEEPKEEEMTEEEKAAQKAKPVATAPIPGTPWCVVWTGDERVFFYNPTTRLSMWDRPDDLIGRADVDKIIQEPPHKKGMEELKKLRHPTPTMLSIQKWQFSMSAIKEEQELMEEINEDEPVKAKKRKRDDNKDIDSEKEAAMEAEIKAARERAIVPLEARMKQFKDMLLERGVSAFSTWEKELHKIVFDPRYLLLNPKERKQVFDQYVKTRAEEERREKKNKIMQAKEDFKKMMEEAKFNPRATFSEFAAKHAKDSRFKAIEKMKDREALFNEFVAAARKKEKEDSKTRGEKIKSDFFELLSNHHLDSQSRWSKVKDKVESDPRYKTVDSSSMREDLFKQYIEKIAKNLD

SEQ ID NO: 4307 - protein, 199 aa, Homo sapiens [sequence omitted]

SEQ ID NO: 4308 - protein, 168 aa, Homo sapiens [sequence omitted]

SEQ ID NO: 4309 - protein, 148 aa, Homo sapiens
MSLLGPKVLLFLAAFIITSDWIPLGVNSQRGDDVTQATPETFTEDPNLVNDPATDETECWDEKFTCTRLYSVHRPVKQCIHQLCFTSLRRMYIVNKEICSRLVCKEHEAMKDELCRQMAGLPPRRLRRSNYFRLPPCENVDLQRPNGL

SEQ ID NO: 4310 - protein, 106 aa, Homo sapiens
MELWGRMLWALLSGPGRRGSTRGWAFSSWQPQPPLAGLSSAIELVSHWTGVFEKRGIPEARESSEYIVAHVLGAKTVKFSVVKRTGRGRREDLGKGYPGFLFTKSA

SEQ ID NO: 4311 - protein, 102 aa, Homo sapiens
MLLAQEEEECRRELLSWVPVPQPPRESCLDLLVDQPHSLLSILDAQTWLSQATDHTFLQRSHYHHGDHPSYAKPRLPLPVFTVRHYAGTVTYQVPGLRDRPG

SEQ ID NO: 4312 - protein, 388 aa, Homo sapiens
MDKRVKKLPLMALSTTMAESFKELDPDSSMGKALEMSCAIQNQLARILAEFEMTLERDVLQPLSRLSEEELPAILKHKKSLQKLVSDWNTLKSRLSQATKNSGSSQGLGGSPGSHSHTTMANKVETLKEEEEELKRKVEQCRDEYLADLYHFVTKEDSYANYFIRLLEIQADYHRRSLSSLDTALAELRENHGQADHSPSMTATHFPRVYGVSLATHLQELGREIALPIEACVMMLLSEGMKEEGLFRLAAGASVLKRLKQTMASDPHSLEEFCSDPHAVAGALKSYLRELPEPLMTFDLYDDWMRAASLKEPGARLQALQEVCSRLPPENLSNLRYLMKFLARLAEEQEVNKMTPSNIAIVLGPNLLWPPEKEGTEPARELGSQTLC

SEQ ID NO: 4313 - protein, 140 aa, Homo sapiens
MWPFRLRCPIYFKTRLLYSSSQDGFLSSSTNYYNHRTYPGLVNWLFVLTEPELTGELGDDDRKGMHTGGIIRWLGRPSSQLKPIFHAEERRVPPPPERLVGRASPREQATVFKRICAPLHAEVFCRAGLCACHPDCTAAG

SEQ ID NO: 4314 - protein, 113 aa, Homo sapiens
MCRLRETALAVPGPPPLGTDPWGAPFPPSFVSSFFFFFFSETESHSVSQAGVQWHDISSLQPPPAGLKQFSCLSLPSSWDYRSTPPCPANFCIFSRDGVSLCWPGWSPTPDLG

SEQ ID NO: 4315 - protein, 379 aa, Homo sapiens
MPKHPNSLSGKGTQLVPSSHLPPPKLRIPNVFSISVALAKRHLSQPQLSSDRMFGTNRNAISMIRPLRPQETDLDLVDGDSTEVLENMDTSCDDGLFSYDSLDSPNSDDQEHCDSAKKVAYSKPPTPPLHRFPSWESRIYAVAKSGIRMSEAFNMESVNKNSAATLSYTTSGLYTSLIYKNMTTPVYTTLKGKATQISSSPFLDDSSGSEEEDSSRSSSRTSESDSRSRSGPGSPRAMKRGVSLSSVASESDYAIPPDAYSTDTEYSQPEQKLPKTCSSSSDNGKNEPLEKSGYLLKMSGKVKSWKRRWFVLKGGELLYYKSPSDVIRKPQGHIELSASCSILRGDNKQTVQVLNFFFFFFFLYHARLNSQLSNLMERR

SEQ ID NO: 4316 - protein, 112 aa, Homo sapiens
MVFPRLFTCPTLETTNFKVGKWHSPPALMGPWEGPLSARACCGSQSSEPAALRSLSARACHRPYSSEPAALRLLNKTLLRSCCAAQGTHPQAVLVLVGLPLSHGETHRPTSV

SEQ ID NO: 4317 - protein, 209 aa, Homo sapiens [sequence omitted]

SEQ ID NO: 4318 - protein, 559 aa, Homo sapiens
MPSGKWEAWGYGKDGTGSRKAQEKNSGANSSSLSTASAPGAAPLTISSPLHVPSSLPGPASSPMPIPNSSPLASPVSSTVSVPLSSSLPISVPTTLPAPASAPLTIPISAPLTVSASGPALLTSVTPPLAPVVPAAPGPPSLAPSGASPSASALTLGLATAPSLSSSQTPGHPLLLAPTSSHVPGLNSTVAPACSPVLVPASALASPFPSAPNPAPAQASLLAPASSASQALATPLAPMAAPQTAILAPSPAPPLAPLPVLAPSPGAAPVLASSQTPVPVMAPSSTPGTSLASASPVPAPTPVLAPSSTQTMLPAPVPSPLPSPASTQTLALAPALAPTLGGSSPSQTLSLGTGNPQGPFPTQTLSLTPASSLVPTPAQTLSLAPGPPLGPTQTLSLAPAPPLAPASPVGPAPAHTLTLAPASSSASLLAPASVQTLTLSPAPVPTLGPAAAQTLALAPASTQSPASQASSLVVSASGAAPLPVTMVSRLPVSKYEPDTLTLRSGPPSPPSTATSFGGPRPRRQPPPPPRSPFYLVSFTSSRGNRKLSFFGVLVGWMEQ

SEQ ID NO: 4319 - protein, 962 aa, Homo sapiens
MDTDLYDEFGNYIGPELDSDEDDDELGRETKDLDEMDDDDDDDDVGDHDDDHPGMEVVLHEVYGPEVETIVQEEDTQPLTEPIIKPVKTKKFTLMEQTLPVTVYEMDFLADLMDNSELIRNVTLCGHLHHGKTCFVDCLIEQTHPEIRKRYDQDLCYTDILFTEQERGVGIKSTPVTVVLPDTKGKSYLFNIMDTPGHVNFSDEVTAGLRISDGVVLFIDAAEGVMLNTERLIKHAVQERLAVTVCINKIDRLILELKLPPTDAYYKLRHIVDEVNGLISMYSTDENLILSPLLGNVCFSSSQYSICFTLGSFAKIYADTFGDINYQEFAKRLWGDIYFNPKTRKFTKKAPTSSSQRSFVEFILEPLYKILAQVVGDVDTSLPRTLDELGIHLTKEELKLNIRPLLRLVCKKFFGEFTGFVDMCVQHIPSPKVGAKPKIEHTYTGGVDSDLGEAMSDCDPDGPLMCHTTKMYSTDDGVQFHAFGRVLSGTIHAGQPVKVLGENYTLEDEEDSQICTVGRLWISVARYHIEVNRVPAGNWVLIEGVDQPIVKTATITEPRGNEEAQIFRPLKFNTTSVIKIAVEPVNPSELPKMLDGLRKVNKSYPSLTTKVEESGEHVILGTGELYLDCVMHDLRKMYSEIDIKVADPVVTFCETVVETSSLKCFAETPNKKNKITMIAEPLEKGLAEDIENEVVQITWNRKKLGEFFQTKYDWDLLAARSIWAFGPDATGPNILVDDTLPSEVDKALLGSVKDSIVQGFQWGTREGPLCDELIRNVKFKILDAVVAQEPLHRGGGQIIPTARRVVYSAFLMATPRLMEPYYFVEVQAPADCVSAVYTVLARRRGHVTQDAPIPGSPLYTIKAFIPAIDSFGFETDLRTHTQGQAFSLSVFHHWQIVPGDPLDKSIVIRPLEPQPAPHLAREFMIKTRRRKGLSEDVSISKFFDDPMLLELAKQDVVLNYPM

SEQ ID NO: 4320 - protein, 281 aa, Homo sapiens
MRFVVALVLLNVAAAGAVPLLATESVKQEEAGVRPSAGNVSTHPSLSQRPGGSTKSHPEPQTPKDSPSKSGSEAQTTKDVPNKSGADGQTPKDGSSKSGAEDQTPKDVPNKSGAEKQTPKDGSNKSGAEEQGPIDGPSKSGAEEQTSKDSPNKEEVKSSEPTEDVEPKEAEDDDTGPEEGSPPKEEKEKMSGSASSENREGTLSDSTGSEKDDLYPNGSGNGSAESSHFFAYLVTAAILVAVLYIAHHNKRKIIAFVLEGKRSKVTRRPKASDYQRLDQKS

SEQ ID NO: 4321 - protein, 647 aa, Homo sapiens
MAAILGDTIMVAKGLVKLTQAAVETHLQHLGIGGELIMAARALQSTAVEQIGMFLGKVQGQDKHEEYFAENFGGPEGEFHFSVPHAAGASTDFSSASAPDQSAPPSLGHAHSEGPAPAYVASGPFREAGFPGQASSPLGRANGRLFADPRDSFSAMGFQRRFFHQDQSPVGGLTAEDIEKARQAKARPENKQHKQTLSEHARERKVPVTRIGRLANFGGLAVGLGFGALAEVAKKSLRSEDPSGKKAVLGSSPFLSEANAERIVRTLCKVRGAALKLGQMLSIQDDAFINPHLAKIFERVRQSADFMPLKQMMKTLNNDLGPNWRDKLEYFEERPFAAASIGQVHLARMKGGREVAMKIQYPGVAQSINSDVNNLMAVLNMSNMLPEGLFPEHLIDVLRRELALECDYQREAACARKFRDLLKGHPFFYVPEIVDELCSPHVLTTELVSGFPLDQAEGLSQEIRNEICYNILVLCLRELFEFHFMQTDPNWSNFFYDPQQHKVALLDFGATREYDRSFTDLYIQIIRAAADRDRETVRAKSIEMKFLTGYEVKVMEDAHLDAILILGEAFASDEPFDFGTQSTTEKIHNLIPVMLRHRLVPPPEETYSLHRKMGGSFLICSKLKARFPCKAMFEEAYSNYCKRQAQQ

SEQ ID NO: 4322 - protein, 419 aa, Homo sapiens
MSRGTRESACCMLTSWASRGWPASVPLRSWCSCSMSSLASSTRLPRKLRAATGVDINMRVGVHSGSVLCGVIGLQKWQYDVWSHDVTLANHMEAGGVPGRVHITGATLALLAGAYAVEDAGMEHRDPYLRELGEPTYLVIDPRAEEEDEKGTAGGLLSSLEGLKMRPSLLMTRYLESWGAAKPFAHLSHGDSPVSTSTPLPEKTLASFSTQWSLDRSRTPRGLDDELDTGDAKFFQVIEQLNSQKQWKQSKDFNPLTLYFREKEMEKEYRLSAIPAFKYYEACTFLVFLSNFIIQMLVTNRPPALAITYSITFLLFLLILFVCFSEDLMRCVLKGPKMLHWLPALSGLVATRPGLRIALGTATILLVFAMAITSLFFFPTSSDCPFQAPNVSSMISNLSWELPGSLPLISVPVSVPTCP

SEQ ID NO: 4323 - protein, 101 aa, Homo sapiens [sequence omitted]

SEQ ID NO: 4324 - protein, 224 aa, Homo sapiens
MVCLVLLNHPKELNMAKQMVKASRLFYFGSARSPLTCDLCCPSRWSQAIQPCPLPLCPDASGARLFRLALTSGRQSTLRDVANTTPPVLSVGRAEAAWEARGDRKRALSSSEKRICHQIEFRPLSLFGRMVQIQIKVVTQPEMSGKAFCRENVPPPAICSQVCATRQPSRNIVWILKMCLFLFLNHFITYFLIYFVMSCFEVLLLSLLSFPLFLSLIYFVKVVH

SEQ ID NO: 4325 - protein, 1192 aa, Homo sapiens
MLDGARLEGDLSLAHEDVAGKDSKFQGPKLSTSGFEWSSKKVSMSSSEIEGNVTFHEKTSAFPIVESVVHEGDLHDPSRDGNLGLAVGEVGMDSKFKKLHFKVPKVSFSSTKTPKDSLVPGAKSSIGLSTIPLSSSECSSFELQQVSACSEPSMQMPKVGFAGFPSSRLDLTGPHFESSILSPCEDVTLTKYQVTVPRAALAPELALEIPSGSQADIPLPKTECSTDLQPPEGVPTSQAESHSGPLNSMIPVSLGQVSFPKFYKPKFVFSVPQMAVPEGDLHAAVGAPVMSPLSPGERVQCPLPSTQLPSPGTCVSQGPEELVASLQTSVVAPGEAPSEDADHEGKGSPLKMPKIKLPSFRWSPKKETGPKVDPECSVEDSKLSLVLDKDEVAPQSAIHMDLPPERDGEKGRSTKPGFAMPKLALPKMKASKSGVSLPQRGVDPSLSSATAGGSFQDTEKASSDGGRGGLGATASATGSEGVNLHRPQVHIPSLGFAKPDLRSSKAKVEVSQPEADLPLPKHDLSTEGDSRGCGLEDVPVSQPCGEGIAPTPEDPLQPSCRKPDAEVLTVESPEEEAMTKDSQESWFKMPKFRMPSLRRSFRDRGGAGKLEVAQTQAPAATGGEAAAKVKEFLVSGSNVEAAMSLQLPEADAEVTASESKSSTDILRCDLDSTGLKLHLSTAGMTGDELSTSEVRIHPSKGPLPFQMPGMRLPETQVLPGEIDETPLSKPGHDLASMEDKTEKWSSQPEGPLKLKASSTDMPSQISVVNVDQLWEDSVLTVKFPKLMVPRFSFAAPSSEDDVFIPTVREVQCPEANIDTALCKESPGLWGASILKAGAGVPGEQPVDLNLPLEAPPISKVRVHIQGAQVESQEVTIHSIVTPEFVDLSVPRTFSTQIVRESEIPTSEIQTPSYGFSLLKVKIPEPHTQARVYTTMTQHSRTQEGTEEAPIQATPGVDSISGDLQPDTGEPFEMISSSVNVLGQQTLTFEVPSGHQLADSCSDEEPAEILEFPPDDSQEATTPLADEGRAPKDKPESKKSGLLWFWLPNIGFSSSVDETGVDSKNDVQRSAPIQTQPEARPEAELPKKQEKAGWFRFPKLGFSSSPTKKSKSTEDGAELEEQKLQEETITFFDARESFSPEEKEEGELIGPVGTGLDSRVMVTSAARTELILPEQDRKADDESKGSGLGPNEG

SEQ ID NO: 4326 - protein, 503 aa, Homo sapiens
MAGLWLGLVWQKLLLWGAASALSLAGASLVLSLLQRVASYALLMKPDGREFFQQIIEYTEEYRHMPLLKLWVGPVPMVALYNAENVEVILTSSKQIDKSSMYKFLEPWLGLGLLTSTGNKWRSRRKMLTPTFHFTILEDFLDIMNEQANILVKKLEKHINQEAFNCFFYITLCALDIICETAMGKNIGAQSNDDSEYVRAVYRMSEMIFRRIKMPWLWLDLWYLMFKEGWEHKKSLKILHTFTNSVIAERANEMNANEDCRGDGRGSAPSKNKRRAFLDLLLSVTDDEGNRLSHEDIREEVDTFMFEGHDTTAAAINWSLYLLGSNPEVQKKVDHELDDVFGKSDRPATVEDLKKLRYLECVIKETLRLFPSVPLFARSVSEDCEVAGYRVLKGTEAVIIPYALHRDPRYFPNPEEFQPERFFPENAQGRHPYAYVPFSAGPRNCIGQKFAVMEEKTILSCILRHFWIESNQKREELGLEGQLILRPSNGIWIKLKRRNADER

SEQ ID NO: 4327 - protein, 491 aa, Homo sapiens [sequence omitted]

SEQ ID NO: 4328 - protein, 116 aa, Homo sapiens
MRLNILPRRRRRGRPRPGPGDRGADPGTEPGFVREADAPRAPPPKHSHPMLRRASGSPWAPRGEPGAPGGSSGELPAGAGRCWWEARCTWRPGMSGRPRSRCIRPLPARPDVPAGS

SEQ ID NO: 4329 - protein, 257 aa, Homo sapiens
MAPPAPGPASGGSGEVDELFDVKNAFYIGSYQQCINEAQRVKLSSPERDVERDVFLYRAYLAQRKFGVVLDEIKPSSAPELQAVRMFADYLAHESRSTAMTVQILLKLDRLDLARKELKRMQDLDEDATLTQLATAWVSLATGGEKLQDAYYIFQEMADKCSPTLLLLNGQAACHMAQGRWEAAEGLLQEALDKDSGYPETLVNLIVLSQHLGKPPEVTNRYLSQLKDAHRSHPFIKEYQAKENDFDRLVLQYAPSA

SEQ ID NO: 4330 - protein, 119 aa, Homo sapiens
MNNAAIINIHTSFLWTWFHFLGICPAVEFLGHLLTMISLLEKLPDFLLIFFFFLLLCSVKKPFNAYELKPCKESDHLGLDRKLLDFKCITLRIFCDSLASPLSSLFFLRIHELAPCLHI

SEQ ID NO: 4331 - protein, 934 aa, Homo sapiens [sequence omitted]

SEQ ID NO: 4332 - protein, 107 aa, Homo sapiens [sequence omitted]

SEQ ID NO: 4333 - protein, 103 aa, Homo sapiens
MRLANFSYFWIETGFHRVAQAGLELLGSSDPPTLASQRVGITGVSHCSQLLGRLGHENCFNPEGGVCSEPRSCHCTPAWATEGDSVSKKKKKVKEGFPEWPLD

SEQ ID NO: 4334 - protein, 103 aa, Homo sapiens [sequence omitted]

SEQ ID NO: 4335 - protein, 115 aa, Homo sapiens
MEEGNTSTVTQQVRGRTRTKPRSLHLSPGLLVTFLQEGLSKSAGAQRQGPTYPCRDTERTKTKPQGGQQPQTSHGLGLFSIYLGRFIKSTFFRELRKEKKYAPFLSLGDSYSRGT

SEQ ID NO: 4336 - protein, 257 aa, Homo sapiens
MPLACEHPVGVSSSVGNAGRAGVGTQAWGTTERTQHPGPAQHCPCGLRVFVLQEKRVVSRNWARGTCGPRVTNEMLEDEDAEDHGGTFCLGELVELAVTMENKAEGKRIVSEKPTRARNQGIEGSPGGRVTRSPPTQVAISSDSARKGSWEPWSRPVGEPPEAGWDYAQWKQEREQIDLARLARHRDAQGDWRRPWDLDKAKSTLQDCSQLRGEGPARAGSRRGEPTPTSSLPSLALFIFHPLVLSFLCLLVSYFQS

SEQ ID NO: 4337 - protein, 117 aa, Homo sapiens
MPSRQLEDPGAGTPSPVRLHALAGFQQRALCHALTFPSLQRLVYSMCSLCQEENEDMVPDALQQNPGAFRLAPALPARPHRGLSTFPGAEHCLRASPKTTLSGGFFVAVIERVEMPT

SEQ ID NO: 4338 - protein, 232 aa, Homo sapiens
MLMETAARTARATSCPVQGDGQEVTCRGALALPSAQLDLLGLGLVEPGTQCGPRMVCQSRRCRKNAFQELQRCLTACHSHGVCNSNHNCHCAPGWAPPFCDKPGFGGSMDSGPVQAENHDTFLLAMLLSVLLPLLPGAGLAWCCYRLPGAHLQRCSWGCRRDPACSGPKDGPHRDHPLGGVHPTELGPTATGQSWPLDPENSHEPSSHPEKPLPAVSPDPQDQVQMPRSCLW

SEQ ID NO: 4339 - protein, 141 aa, Homo sapiens
MMGSTHIYDMSTVMSRKGPAPELQGVEVALAPEELELDPMAMTQKYEEHVREQQAQVEKEDFSDMVAEHAAKQKVGASRGAGLGESQGPWPAVFSGMVPSSGESEGGLCLLLCASLDLEVLEILQWAALFKDDEGEELSQV

SEQ ID NO: 4340 - protein, 352 aa, Homo sapiens
MSQIRKLDEDASPNEEKGDVPKDTLDDLFPNEDEQSPAPSPGGGDVSGQHGGYEIPARLRILHNLVIQYASQGRYEVAVPLCKQALEDLEKTSGHDHPDVATMLNILALVYRDQNKYKEAAHLLNDALAIREKTLGKDHPAVAATLNNLAVLYGKRGKYKEAEPLCKRALEIREKVLGKFHPDVAKQLSNLALLCQNQGKAEEVEYYYRRALEIYATRLGPDDPNVAKTKNNLASCYLKQGKYQDAETLYKEILTRAHEKEFGSVNGDNKPIWMHAEEREESKDKRRDSAPYGEYGSWYKACKVDSPIVNTTLRSLGALYRRQGKLEAAHTLEDCASRTASRVWTPQARPRW

SEQ ID NO: 4341 - protein, 112 aa, Homo sapiens [sequence omitted]

SEQ ID NO: 4342 - protein, 1253 aa, Homo sapiens [sequence omitted]

SEQ ID NO: 4343 - protein, 104 aa, Homo sapiens
MCHHAWLSFVFLVETGFHHIGQAGLELLTSSDPPTSASQSAGITGMSHHTRLSNTILSRSGERGHPCLVPVFKGNASSFCPFSIILAVFVINSSYYFEIHSIST

SEQ ID NO: 4344 - protein, 772 aa, Homo sapiens [sequence omitted]

SEQ ID NO: 4345 - protein, 235 aa, Homo sapiens
MDLSLHVASLCLPHHPSPAQLKPAGALCRQAMGDCDLPEFCTGTSSHCPPDVYLLDGSPCARGSGYCWDGACPTLEQQCQQLWGPGERTRAPLHPAPHPLVGPVFYCGEDGQGKLRPAERSPSPSCPQPGPCFLRLPPSSRGLFPGGELCGRCSWKLRPGQRGPLPALCREGCPVWEAAVPGWKAQPARTAHGASGLYRSPRWPGSDLSGSLGTPQCPAGPAWPGPGRARHPVWT

SEQ ID NO: 4346 - protein, 125 aa, Homo sapiens [sequence omitted]

SEQ ID NO: 4347 - protein, 170 aa, Homo sapiens
MATATNELGQATCAASLTVRPGGSTSPFSSPITSDEEYLSPPEEFPEPGETWPRTPTMKPSPSQNRRSSDTGSKAPPTFKVSLMDQSVREGQDVIMSIRVQGEPKPVVSWLRNRQPVRPDQRRFAEEAEGGLCRLRILAAERGDAGFYTCKAVNEYGARQCEARLEVRGE

SEQ ID NO: 4348 - protein, 314 aa, Homo sapiens [sequence omitted]

SEQ ID NO: 4349 - protein, 413 aa, Homo sapiens
MSLTTDDLLRLPADGSFSYTYVGPSHRTSKKNKKCRGRLGSLDIEKNPHFQGPYTSMGKDNFVTPVIRSNINGKQCGRLKNPKLMNRTNNCISESSLSFPKKSSFKDSSEHSLEKNYPRWLTSQKSDLNVSGITSIPDFKYPVWLHNQDLLPDANSQRVYQIFKDDQCSPRHSHQAQGTSRLINKLDCFEYAFEPSNFSNSLSDDKELVNEYKCDFEHSQCQCENPLLPGQSTKPFSGDKIELLILKAKRNLEQCTEELPKSMKKDDSPCSLDKLEADRSWENIPVTFKSPVPVNSDDSPQQTSRAKSAKGVLEDFLNNDNQSCTLSGGKHHGPVEALKQMLFNLQAVQERFNQNKTTDPKEEIKQVSEDDFSKLQLKESMIPITRSLQKALHHLSRLRDLVDDTNGERSPKM

SEQ ID NO: 4350 - protein, 135 aa, Homo sapiens [sequence omitted]

SEQ ID NO: 4351 - protein, 205 aa, Homo sapiens
MLPSFYSELFTLYLLLHEREDSFYSQGIANLSLFPDTQLLEFLDVQKHLWPLKDLTLTSNQRYSLVRDKCFLSATECLQKIMTTVDPREKLEVLERTYGEIEGTVSRVLGREYKLPMDDLLPLLIYVVSRARWGSQGPEKGGSQPGCWGARGRVRTTPQVSSHPGQRSFPSCLSATGLFSLSPSLSWWGGVLQNSAPGSRDPPDP

SEQ ID NO: 4352 - protein, 416 aa, Homo sapiens
MSPAMLSVLVKMMLAQAQESVFEKISLPGIRNEFFMLVKVAQEAAKVGEVYQQLHAAMSQAPVKENIPYSWASLACVKAHHYAALAHYFTAILLIDHQVKPGTDLDHQEKCLSQLYDHMPEGLTPLATLKNDQQRRQLGKSHLRRAMAHHEESVREASLCKKLRSIEVLQKVLCAAQERSRLTYAQHQEEDDLLNLIDAPSVVAKTEQEVDIILPQFSKLTVTDFFQKLGPLSVFSANKRWTPPRSIRFTAEEGDLGFTLRGNAPVQVHFLDPYCSASVAGAREGDYIVSIQLVDCKWLTLSEVMKLLKSFGEDEIEMKVVSLLDSTSSMHNKSATYSVGMQKTYSMICLAIDDDDKTDKTKKISKKLSFLSWGTNKNRQKSASTLCLPSVGAARPQVKKKLPSPFSLLNSDSSWY

SEQ ID NO: 4353 - protein, 296 aa, Homo sapiens
MSALILPRMKGPRLTHPESRAHQALPGHSLSSSSHSLRSACATQIQTSRTWEVEWLTRGHPLEEAKAGLEPRPVGVQVRPLPAAQCPLSSSSLGTLEPQWGVQGSAQPFPRCVTPSTFLPLSVPLGVARELGGVILHHEHPPFSPSAEKSVPLCILYEKYRDCLTESNLIKVRALLVEPVINSYLLAERDLYLENPEIKIRILGEPKQKRKLVAEVSLQNPLPVALEGCTFTVEGAGLTEEQKTVEIPDPVEAGEEVKVRMDLLPLHMGLHKLVVNFESDKLKAVKGFRNVIIGPA

SEQ ID NO: 4354 - protein, 130 aa, Homo sapiens
MSALAVSMAMVRGSLPSESRAPRSAPRFRNRQASLERRARVSRPPNFSQPSSPCHHPYPVWPRMVAWCSGPRPALSAWFTFAPFWRRNSQARREFCMEKSRRGVEGGIPSGGFQDVLGWRQFREWEGGVW

SEQ ID NO: 4355 - protein, 213 aa, Homo sapiens [sequence omitted]

SEQ ID NO: 4356 - protein, 333 aa, Homo sapiens
MKYRSCADCVLARDPYCAWSVNTSRCVAVGGHSGSLLIQHVMTSDTSGICNLRGSKKVRPTPKNITVVAGTDLVLPCHLSSNLAHARWTFGGRDLPAEQPGSFLYDARLQALVVMAAQPRHAGAYHCFSEEQGARLAAEGYLVAVVAGPSVTLEARAPLENLGLVWLAVVALGAVCLVLLLLVLSLRRRLREELEKGAKATERTLVYPLELPKEPTSPPFRPCPEPDEKLWDPVGYYYSDGSLKIVPGHARCQPGGGPPSPPPGIPGQPLPSPTRLHLGGGRNSNANGYVRLQLGGEDRGGLGHPLPELADELRRKLQQRQPLPDSNPEESSV

SEQ ID NO: 4357 - protein, 180 aa, Homo sapiens
MLEGVSNEFDHFGISLPLKICLHLGWDEGLVEGKVVRLGQGIGKSICSSCQLFEEAPTQMSTVPSGLPLPILMHLCLLPVCMAHLCPASPCYFGATPGSGKFCRLITYSHSSPQLAASLRHRGREVGKDLPYPGLCPLTFHPSFFPPVEGCVSSLPGKLLSPQTIFFQILWLYSKSSLVL

SEQ ID NO: 4358 - protein, 1222 aa, Homo sapiens [sequence omitted]

SEQ ID NO: 4359 - protein, 141 aa, Homo sapiens
MNQLPAGPPVPGSGSGPLAACPELTSATSPWLQVGTNAMDSPLLKYSAKDYFFKAALCHFCIDMLNAKLAVQKYEELFPAFSDSRECKLMKKLLEAHEEQNVDSYTESVKEYDSISRLDQWLTTMLLRIKKTIQGDEEDLR

SEQ ID NO: 4360 - protein, 545 aa, Homo sapiens [sequence omitted]

SEQ ID NO: 4361 - protein, 168 aa, Homo sapiens [sequence omitted]

SEQ ID NO: 4362 - protein, 108 aa, Homo sapiens [sequence omitted]

SEQ ID NO: 4363 - protein, 163 aa, Homo sapiens [sequence omitted]

SEQ ID NO: 4364 - protein, 118 aa, Homo sapiens [sequence omitted]

SEQ ID NO: 4365 - protein, 222 aa, Homo sapiens
MGTSALTVSSALPSVGTSAHTLSSALPVHGDVCTHRMSSALPSVNGDVCTHSVLGTALRGDVCTHTVLGTALRGDVCTHSVLGTALRKWGRLHSQNVLGTALRGDVCTHSVLGTALRGDVCTHSVLGTALRGDVCTHSVLGTALRGDVCTHRMSSALPSMGTSALTVSSALPSVGTSALTECPRHCPPWGRLHSQCPRHCPPGRLHTVSLAQLGLGALALEA

SEQ ID NO: 4366 - protein, 105 aa, Homo sapiens
MSICLKHVLFGAAVAFLFLCIFSFSFLFFFFFLFVLRFCLDLLPRLECSGVISAHCNLCLPGSSNCPASASRVAGITGACHHAQLIFCVLVETGFHHVGRLVSNS

SEQ ID NO: 4367 - protein, 588 aa, Homo sapiens
MDLRTAVYNAARDGKLQLLQKLLSGRSREELDELTGEVAGGGTPLLIAARYGHLVGEHQADLEVANRHGHTCHMISCYKGHREIARYLLEQGAQVNRRSAKGNTALHDCAESGSLEILQLLLGCKARMERDGYGMTPLLAASVTGHTNIVEYLIQEQPGQEQVAGGEAQPGLPQEDPSTSQGCAQPQGAPCCSSSPEEPLNGESYESCCPTSREAAVEALELPGATYVDKKRDLLGALKHWRRAMELRHQGGEYLPKPEPPQLVLAYDYSREVNTTEELEALITDPDEMRMQALLIRERILGPSHPDTSYYIRYRGAVYADSGNFERCIRLWKYALDMQQSNLEPLSPMTASSFLSFAELFSYVLQDRAAKGSLGTQIGFADLMGVLTKGVREVERALQLPREPGDSAQFTKALAIILHLLYLLEKVECTPSQEHLKHQTVYRLLKCAPRGKNGFTPLHMAVDKDTTNVGRYPVGRFPSLHVVKVLLDCGADPDSRDFDNNTPLHIAAQNNCPAIMNALIEAGAHMDATNAFKKTAYELLDEKLLARGTMQPFNYVTLQCLAARALDKNKIPYKGFIPEDLEAFIELH

SEQ ID NO: 4368 - protein, 624 aa, Homo sapiens
MCMCQASPPPAALAGCLLSSCVQPAREHGGAFSKAEWLSNCINKYGSPYTKNSGFATCVQNLPDQCTPNPCDRKGTQACQDLMGNFFCLCKAGWGGRLCDKDVNECSQENGGCLQICHNKPGSFHCSCHSGFELSSDGRTCQDIDECADSEACGEARCKNLPGSYSCLCDEGFAYSSQEKACRDVDECLQGRCEQVCVNSPGSYTCHCDGRGGLKLSQDMDTCEDILPCVPFSVAKSVKSLYLGRMFSGTPVIRLRFKRLQPTRLVAEFDFRTFDPEGILLFAGGHQDSTWIVLALRAGRLELQLRYNGVGRVTSSGPVINHGMWQTISVEELARNLVIKVNRDAVMKIAVAGDLFQPERGLYHLNLTVGGIPFHEKDLVQPINPRLDGCMRSWNWLNGEDTTIQETVKVNTRMQCFSVTERGSFYPGSGFAFYSLDYMRTPLDVGTESTWEVEVVAHIRPAADTGVLFALWAPDLRAVPLSVALVDYHSTKKLKKQLVVLAVEHTALALMEIKVCDGQEHVVTVSLRDGEATLEVDGTRGQSEVSAAQLQERLAVLERHLRSPVLTFAGGLPDVPVTSAPVTAFYRGCMTLEVNRRLLDLDEAAYKHSDITAHSCPPVEPAAA

SEQ ID NO: 4369 - protein, 528 aa, Homo sapiens [sequence omitted]

SEQ ID NO: 4370 - protein, 165 aa, Homo sapiens [sequence omitted]

SEQ ID NO: 4371 - protein, 367 aa, Homo sapiens
MIVRPSTATWNSPTMPWPLLLLLAVSGAQTTRPCFPGCQCEVETFGLFDSFSLTRVDCSGLGPHIMPVPIPLDTAHLDLSSNRLEMVNESVLAGPGYTTLAGLDLSHNLLTSISPTAFSRLRYLESLDLSHNGLTALPAESFTSSPLSDVNLSHNQLREVSVSAFTTHSQGRALHVDLSHNLIHRLVPHPTRAGLPAPTIQSLNLAWNRLHAVPNLRDLPLRYLSLDGNPLAVIGPGAFAGLGGLTHLSLASLQRLPELAPSGFRELPGLQVLDLSGNPKLNWAGAEVFSGLSSLQELDLSGTNLVPLPEALLLHLPALQSVSVGQDVRCRRLVREGTYPRRPGSSPKVALHCVDTRESAARGPTIL

SEQ ID NO: 4372 - protein, 467 aa, Homo sapiens [sequence omitted]

SEQ ID NO: 4373 - protein, 1004 aa, Homo sapiens [sequence omitted]

SEQ ID NO: 4374 - protein, 550 aa, Homo sapiens
MGWSDLQPAMGGEAERFQAQLEVKLVTGGSPVVFTGNLTRQVGSKLAFSASLSHLLSDQANVTALLERKEENGRRVAALGAELFVPGLVGLRALGLLQQQGQLWTNSLRIQYSLLGQAKQAAHECSTSQKLRADSGSDGAYRLELRHELHCTQILAFSHKVQLWHEEDSGHLHSQLEVSYGKQWDKNSNKRHLRVSQTFKNDSGPALSNHFMEFVLQVPERQVDCRVQLYHLSLRLPYVESSSHLKVQYNGRPLFVAGGQWKDTSRATLWKWEGVLNLDSPWLMVSAAHRLYWPHRAVFQAVLELTLGKAWTLKDLVVSVGCRSQGPNREGKIQVYTAATTYLRVSTVTVLAQSLFHSWSELESAWNTAVQGEIHAENSRDRKILNCWLKGPQQELNLTAAYRHLEWPRKTQVSLTAVWIGAQGQPRGLQLEGELEELRQDRTLYRKRGALLLRHPLHLPIPQSLLLQETFTADRRHQRYSLETRVVLNGREETLQTMVLGCQAGHPYVCAGLMHPYDGKVIPRNTEGCLVTWNQHTSLALLSGLESGVQ

SEQ ID NO: 4375 - protein, 147 aa, Homo sapiens [sequence omitted]

SEQ ID NO: 4376 - protein, 169 aa, Homo sapiens [sequence omitted]

SEQ ID NO: 4377 - DNA, 1965 bp, Homo sapiens
ttgctgcatgccttcattcctggtgccctctcttgtctcttccccagtcctgctgaagctgctctttagcccaggccccaagactatatggtccctgtggcagcagccaatgttgtttcaggaagcaacagcatttgaaaatatgaccaaagattggaattatttagaaggctctcaaaaggattgctacagagacacaatgctggacagttatgagaacacggtcccacagggatccttcttacagctctccatgatgcctcagagagctggaaatgatccacctggggtttcaaatgcaagtgaaatggaaatggagataagtaacatgagagaaaagtttcttatgagtgtaacaaagttagtagaaagcaaaagttacaacagcaaggtattttccaaagaaaagtactttcaaacaataaaggaagttaaagaagctaaagaaaaagggaagaagtcatcacgtgattatcgccgtgcagcaaaatatgatgtgatctctgtacagggcacagagaaactgatagaggctactcatggagaacgtgatcgaatacggtattatgtacataaggaagagttgtttgatattcttcatgatacacatctcagtattggacatggtgggcggacacgcatgctcaaggagctgcaaggaaaatatgggaatgtcaccaaagaagttattgtcttatatctgactctgtgtaaacagtgccaccagaagaacccagtacccaagagaggccttgcaccaaagcccatgacttttaaggacatagactccacatgccaagttgaaatacttgacatgcagtccagtgccgatggtgagttcaagttcattttatactaccaggatcactcaaccaagtttattattttacggccattaagaaccaaacaggcccatgaggtggtcagtgtcttgttagatattttcacaattcttggtacacccagtgtgttagactctgacagtggcgttgagttcacaaaccaggttgttcatgagctcaatgagttgtggccagacctaaagattgtatctggtaagtaccaccctggccaaagccagggctccctggaaggagcaagccgtgatgtaaagaacatgataagtacctggatgcagagtaaccactcatgtcactgggccaaaggcctccgattcatgcagatggtgaggaatcaggctttcgacgtttccttgcagcaaagtccatttgaggcaatgtttggctataaagccaaatttgggctatattcctcaaacttgccccgggaaactgtggctactttacaaacggaagaagagctagaaattgctgaagaacagctagaaaatagcctttggatcaggcaggaagaaagggctgagattggagcagacagatctgatatggacgatgacatggatcccactcctgaagcttcagaacccagcacctcacaagggacttccggtctcctctgctggtgaacagatggctgctgggtggacagtcacaggtgtctctctgagcatagtcatctgagaactgttgccagaggccccagaggaaaagattgaaggctgcactctcaggtcaagttgtacatggcagtccttgctcaaaaagacaaaagttcaggtctgtgtatttattcttagggctgccataaaaaattaccacaacctggccgggcgcagcgctcatgcccgtaatcccagcactttggtaggccgaggtgggcgggtcacttgagatcaggagttcaagactagcctggccaacatgatgaaaccctgtctctactgaaaatatagaaattggccaggcttggagctgtgtgcctgtaatcccagctaaccaggaggctgaggcaggagaatcacttgaacccgggaggcagaggttgcagtgagccgagaccatgccactgcactccggcctgggtgacaaagcaagactctgtctc

SEQ ID NO: 4378 - DNA, 2607 bp, Homo sapiens
agagcgaggtggtgaggagagctggttgcgtgagtctcctcagctctgcttaccggtgcgactagcggcagcgacgcggctaaaagcgaaggggcgagtgcgagtcccctgagctgtacgaacgcggtcgccatggaccgcccagatgaggggcctccggccaagacccgccgcctgagcagctccgagtctccacagcgcgacccgcccccgccgccgccgccgccgccgctcctccgactgccgctgcctccaccccagcagcgcccgaggctccaggaggaaacggaggcggcacaggtgctggccgatatgaggggggtgggactgggccccgcgctgcccccgccgcctccctatgtcattctcgaggagggggggatccgcgcatacttcacgctcggtgctgagtgtcccggctgggattctaccatcgagtcggggtatggggaggcgcccccgcccacggagagcctggaagcactccccactcctgaggcctcgggggggagcctggaaatcgattttcaggttgtacagtcgagcagttttggtggagagggggccctagaaacctgtagcgcagtggggtgggcgccccagaggttagttgacccgaagagcaaggaagaggcgatcatcatagtggaggatgaggatgaggatgagcgggagagtatgaggagcagcaggaggcggcggcggcggcggaggaggaagcagaggaaggtgaagagggaaagcagagagagaaatgccgagaggatggagagcatcctgcaggcactggaggatattcagctggatctggaggcagtgaacatcaaggcaggcaaagccttcctgcgtctcaagcgcaagttcatccagatgcgaagacccttcctggagcgcagagacctcatcatccagcatatcccaggcttctgggtcaaagcactccactcatcagttcctcaaccaccccagaatttcaattttgatcaaccgacgtgatgaagacattttccgctacttgaccaatctgcaggtcaggccagagagacattttttagtaggatcgggcacgaatctggttcttggaggtgacgggaggtgggtgggaagggccgtggtgtgttgggggggggacagattccaccatcacccccacctggagcaggtacaggatctcagacatatctccatgggctacaaaatgaagctgtacttccagactaacccctacttcacaaacatggtgattgtcaaggagttccagcgcaaccgctcaggccggctggtgtctcactcaaccccaatccgctggcaccggggccaggaaccccaggcccgtcgtcacgggaaccaggatgcgagccacagctttttcagctggttctcaaaccatagcctcccagaggctgacaggattgctgagattatcaagaatgatctgtgggttaaccctctacgctactacctgagagaaaggggctccaggataaagagaaagaagcaagaaatgaagaaacggtaatgggagtttggtcgctgagaggtggtttgttggggatggggaaaagactagtgtaacacaggatttatggagccaaaaagggacctttgagataatcccagtgggatatgttttacaagtgggaaatcatgcccagaaatggcttgaggttacacagtcaggggcagaagtgggactttacccaccctagccccattcctgggatcccttatagcctactgcttccccagttacttcccacctttgagtgctatgagtacaccacctcccaccaaccctatactcagccacagccttccttacagtaaaaccaggggcagatgtgaggtggtgatcatggaagacgcccctgactattatgcagtggaagacattttcagcgagatctcagacattgatgagacaattcatgacatcaagatctctgacttcatggagaccactgactacttcgagaccactgacaatgagataactgacatcaatgagaacatctgcgacagcgagaatcctgaccacaatgaggtccccaacaacgagaccactgataacaacgagagtgctgatgaccacgaaaccactgacaacaatgagagtgcagatgacaacaacgagaatcctgaagacaataacaagaacactgatgacaacgaagagaaccctaacaacaacgagaacacttacggcaacaacttcttcaaaggtggcttctggggcagccatggcaacaaccaggacagcagcgacagtgacaatgaagcagatgaggccagtgatgatgaagataatgatggcaacgaaggtgacaatgagggcagtgatgatgatggcaatgaaggtgacaatgaaggcagcgatgatgacgacagagacattgagtactatgagaaagttattgaagactttgacaaggatcaggctgactacgaggacgtgatagagatcatctcagacgaatcagtggaagaagagggcattgaggaaggtgagctaatccccccccacccttgtcttccctcttttcttttcccagagcaagcctggccaaggacagggtatcaaggcatgaacacaatctgcttttatgg

SEQ ID NO: 4379 - DNA, 2080 bp, Homo sapiens
tctaggaagtgtctgtagccgcagctgcgggtccgggattcccagccatggcagattcctccgggcagcagggtgagcggcgcggccgggccaggctgagggcggctgggggcctgactgggcgctgggtgctcggctcgaagggcagcgagtccttatgtctgaggggcccgggtgcatgggttctgaggggcagctgtgtccgtggtctgaggggcggcagtgcccgaggtctgaggggtgtcagtgcgcggggtccgagggacggcacgtccttgggtccgaggggcgggggtgctcggggtctgaggggtgtcagtgcccggggtctgagggacggcgggtcctgaggttcgaggggtggcacgtcctaggatccgaaggacaacgggtgcccggctccgagggacggccactgggacccctgggactcctgcgtgagggtctgccagacccgtggctggagcacagaccccgcggggacccgagcccgagcggggcgctgcccagaccacccagcctcagtttcctcacttggttcctgccgaggtccccttgcatcctcaccccgggaggtggccctacatcaaacagcctttccccagccggtgcctgggcgggccctcgctccctcttgccccagctggcctttaggggggagacaaaggcccaagggttgttttggttttctgcccagacctggcagcttccgggaggtgggcggagggcacctgaggttggtatttagggaaatggggcagaggacgccaggggtacgcgtacacacagtaaaagggcttggggctttacgaaggctttcatctccagttccgcaggcagtccactgcaagctgattgtcagagcattactgccccattttattgccaacccgggaggttccccagggacacagctgtgtcagctcccccagtcactcatgtcaccagcgggtagaccttgagagaccagtgggttcttctctcactgtccctccagcaagattttaggtgctggaaaggcaagagactgaatcagaaagcccagattcctaacagtctggagcagcctttccaaaggaaacattctcagtatctagtttttaattcttttggctggcaaaaattagatgcaagttcttgtaagacacctccagcccccaccctcagtttagatcgtaccaagatttccttagcatctggtggtgccctttgcccctgagggtttattgggttatagataggtagttatgacaacccgagtaatctggcggcatggggacacccagatgacagggctacactcttgtgccaagtggcaggaggtggtcaccttccaggcacgccgcctaccaccctacctgtgtgcctggattccagcaccatctccacccgtcccagagccaagcggccctcagaagtcacccagattcctgtaaaacagcatcatagttaacagccccaactctggaaccaccctggaagggccagggtcccaactctgcctcccgccccacagcaaaccatgcgtaatggctcctaccttggagcatggagtgtaaatgaattaatagatgggaaggacgtagaacagtgcctggcactcaattaagtgctgtgtccgtgctgaaagttagggcctgtttgttttcaaactaaaaatgtgtttttgttcatttgtgaacgtaaatgacgtattagtagtgttttgtatcttgtttttaaaaatagctttagaattttaggttttcagagccttgtaagaattgccttctttttggagcttgccatataggttgggattgccctctccgggctgtcagggcagcaggcagattgcccagtcctcagcctgcgcacagcatctccagccagtgttcttctgccccagggcatggcccacctgcctttactatcgcctcctcccatcacacacacactctcaaagatgagaacaggaaataaaatccaatcgtaggccaggcgcagtggctcacacctgtaatcccagcactttgggaggccgaggcaggcagatcacgaggtcaggagatcgagaccatggtgaaaccctgtctctact

SEQ ID NO: 4380 - DNA, 2473 bp, Homo sapiens
gtgcagaccttgaatcgaaacccaggctcctgcaggcactggcacagctacagcgagggcctcggccatccaagggtctcccaggtgaccttccctccaccccaggaagctatgacagaggccgggaagctgcccctaccgctacccccacggctggactggtttgtgcacacccagatgggccagctggcccaagacggggtccccgagtggttccatggtgcaatctcaagagacagccttggaagtggagtttactctccccttgaggaagctgaaggtcagaaagggagagacgattgcctgaggtcacacagctgatggacagtagagctgggttatgaactcgaatgcatctgagcatacagggatgctgagaacttgctggagtcacagccactgggatcctttctcatcagggtcagtcacagccatgtgggctacacactctcctacaagtaaggcctgggccgggatccagggcaggggcaggtgggctcttgggtttccttggagggggcaaggggtgcttcatgtcatagcttctcagaaagcagcagtaactgaggctgtggatctgagaacgggagctgctagccaagcaatgagtgaagcttttgtccgtagtggcatgttttatctgaggccagcctttgtactcctgtgttataaatgggggaaactgaggcacagcgaggttagtaacctgctgggtgttgcatggccagtgagtgaagaagcctgcatgggaacctggggtagtctggctgtagcagtgacgctgccggcccaagggctggggacttggggcagggatgagggggagtaggatgtcccagcccccgcagtgtctccgcagagcccaaagcagctgctgccatttcatggtgaagctcttggatgatgggactttcatgatccccggggagaaggtggcccacacctcgctggacgccctggtcaccttccaccagcagaagccaattgagccgcgcagggagctgctgacacagccctgcaggcagaaggatcccgcaaacgtggattacgaggatctcttcctctactccaacgcagtggccgaggaagctgcctgcccggtgtctgcccctgaggaggcctccccaaagccagtcctgtgtcaccaatcaaaggaaaggaagccgtcagcagagatgaacggaataaccaccaaggaagccacttcctcctgccccccaaaatcccctcttggagagacccgccagaaactctggaggagcctcaaaatgctccccgagagaggccagagggtccggcagcagctaaaaagccacctcgccactgtgaacttgtcgtcactcttggatgtccggagatccacggtgatctcaggccctgggaccggaaaaggcagccaagatcactcaggggatcccacctcgggggacagaggctacacggatccctgtgtggccacatctctcaaaagcccctcacagccccaggcaccaaaagacagaaaggtccccaccaggaaggccgagaggtcggtcagctgcattgaggtgaccccaggggacaggagttggcaccaaatggtagtgagagccctatcctcccaggagtccaagccagagcaccagggcttggcagagcctgagaacgaccagctcccggaggagtaccaacaaccgccaccctttgcccctgggtactgctagagaacaggtccaccctggctctgggactcgctgccaggggctgccacactcctgaatgccttaacatttcttccatggccccacaccatggcatccgggggtcttcgggaacccgggaaatggaataaagatgtttttggggtctgttcctgcactcacccatggggtgagctggttattttagcaacaatcatcagagtgacgctgatggtttggggcaccagctatacatcagccccagtgccagaccttctattcattattttacgcctcagagcaaggccctcagggagggtcatcctccatgttttgaagaagagactgaggttcagagaggataagaggcgtgaccaaggccacagagctatgggtgtcagcaccaggatttgaagccaggtgaatccgagcccttttcccatatcatctgtttgttctgttgtctaaaagcacactgcaagccgggctcagtggctcatgcctgtagtcccagcactctgtggggccgaggcaggcagatcgcttgaggtcaggagtttgagaccagcctggccaacatggtgaaaccccgtctatactaaaaaattcaaaaattacccggacgtggtggcgcatgcctgtaatcccagctacttgggagcctgaggcgggagaattgcttgaacccgggaggcagaggttgcagtgagccgagatcgcatcactgcagtccagcctggatgacagagtgagactccatctcaaaaaataaataaataaataaaaatgaaatt

SEQ ID NO: 4381 - DNA, 2419 bp, Homo sapiens
gcactctttcgcccggcctccggttctcgccggctctcggacccgcctccgaagacgtggagcgctgcggcggctgatttgtcaaagatgaaagtgaccttatcagctttggatacttctgagagttctttcacacctttggtggtcatagaacttgctcaggatgtcaaagaagaaaccaaagaatggctgaaaaacagaattatagctaaaaaaaaagatggagataacaatgatgatttcctgacaatggcagaatgtcaattcattatcaaacatgaacttgaaaatcttagagctaaagatgaaaaaatgatccctggttaccctcaggcaaagttgtatccaggaaaatcattgttgagaagattgctcacgtctggcatcgtgattcaggtgtttccactgcatgacagtgaagccctgaagaagcttgaggacacctggtacactcggtttgctttgaagtatcagcccatagacagtattcgtggctactttggggaaacaattgctctgtactttggatttttggagtatttcacttttgcattaatccccatggctgtcattgggttaccttactacttgtttgtgtgggaagactatgacaagtacgtgatctttgcctcgttcaacctcatctggtccacggtgattctggaactgtggaagcgtggctgtgccaacatgacctacaggtgggggacactgctcatgaagagaaagtttgaggagccccggccaggatttcatggtgtcttgggtatcaattccatcactgggaaggaggagcctctgtaccccagctacaagagacagttgcgcatttacctggtctccctgccattcgtgtgcctctgcctctatttctcactgtatgtcatgatgatttacttcgacatggaggtttgggccttgggtctacatgagaacagcgggtctgagtggaccagtgtcctgttgtatgtgcccagcatcatctatgccattgtgattgagatcatgaatcgtctctatcgatatgctgccgagtttttaacttcatgggagaatcacagattggaatctgcctatcagaaccatctaattctgaaagttttagtgttcaacttcctcaattgctttgcctcactcttctatattgcctttgtcttgaaagatatgaagcttttgcgccagagcttggccactctcctaattacctcccagatcctcaaccaaattatggaatcttttcttccttattggctccaaaggaagcatggtgtgcaggtgaagaggaaggtgcaggctttaaaggcagacattgatgctacattatatgaacaagtcatcctggaaaaagaaatgggaacttatttgggcacctttgatgattacttggagttattcctgcagtttggttatgtgagccttttctcctgtgtttacccattagcagctgcctttgctgtgttaaataacttcactgaagtaaattcagatgccttaaaaatgtgcagggtcttcaaacgtccattctcagaaccttcagccaatattggtgtgtggcagttggcttttgaaacgatgagtgttatatctgtggtcactaactgtgcgctgattggaatgtcaccacaagtgaatgcagtctttccagaatcaaaagcagacctcattttgattgtagtagcagtggagcacgcactcctggctttaaagtttatacttgcatttgccatacctgataagccacggcatatccagatgaaactagccagactggaatttgagtctttggaggcactcaagcagcagcaaatgaagctcgtgaccgagaacctgaaggaggaaccaatggaaagcgggaaggagaaggcaacctgagtgcccagcgtgcccagctgccctgttggcagaggcctgtgtctgtgccacacctgccacggtggcagggggggtacccggggcagcatcgtggctcctgaacccagacccaatgcttagccaaacgaagtggctcccatgtggcaagcacccttctcagtttcgcagtggcttggctcgggatccttggcagttcccccagccccaccctgtctgctccttcccagttccttcccgggccccacacgctgctccagctgccaactttgctgcagagccactgccgcccttgagcctctcaccatgagtgagccaccagctctccacgttcccctcatagcagtgtcactcccaaccccaccatggcccagggacccgtggacaggttggggatggggtgtgtgcccactgtgctcatcacaggagcctcagttgagagtgagcggggtacagtaaggcagtgcttcccacactggacctctttcctggttctcttttgcaatacattaacagaccctttatcaacataaacaatagtaactgagct

SEQ ID NO: 4382 - DNA, 2220 bp, Homo sapiens
ttttctataagcctctttgcattcttactttgcatcccaggaggtacaagtaagaaaaaaaaaaaaaaaaaaggtcttctgaattcttctgaattattttctaagtagaagtgggagtgatggctattttccaggttagtattggttagagctcaccagaactgaatttgtcagaaaaatagagggtatctatgaggctttgtggcgagagacaaaagggaacaaggaaaaaaagatgttgctggcagccaggagatatactttggggagaagaatggaagtgttactgtattgtatcttgcttttttagaaaagtgtgaatagaaatcttctgggtttactaatgtgttatagagctggatttgggcgttttgtggcaattggagttgcgtagtttacgtaacattgagcagaggtgcaagatgggagagacaagagctcagactgcccaacgggtctcagaaaatgtaggttacatccataatacatttgtttgttgtttttatttgagctactttgtataggcatctattttcttgcaatcaaataagctctaacgaaaatgatgtgtaatgtacaaagtaccttagcagcttcaataagcattagacatgatctccaccctttcatgaattcacctgtgttatatgggtaagttagactccaggaacaatcataaaacagccttattcttttctccagctgtccctttagaacaaaactctgtctagttctaaacagaatcacactgatttttgaagataacatagctttttttctggctcttttgcatcacaaatagtatcatttacaaaattaaaatgcccggcctagtctaatataacattattagcttcaggattcattcagagagaaacttttcctctctctgagcttgagtggctgtgggtctggaaacctgcactggggaagggaagacaggaggcccttctcttggcccccttcctggtatgttccttgctcctcttctgcactcgctagtcctccctggcctgttccttgctcctcctctgcactcagcagtcctccctggcatgttccttgctcctcctctgcactcgccggtcctccctggcatgttcctcgctcctcctctgcactcgccagtcttaatttctcacttctccaaggttgggttcagggggaggagggatgagagaaaggatacagcgtcacatggtggttatggatctcatctggtgatgggtctctctggatgtgacaaatacacaaagccgcactttttctcatggggagcttttggagagcttctttggagaccctcacatagaatgttggaagatggcttttagccttttctctcactgtgatgccttcacacatcctcacacttcctgtctttaccctcttctggtcctttggctctattgggtggagttccttacaaaatggctcttgggattcccccatgtagttcacttctggcttatgagaaacacccacattttcccaccatcaccagaaccgacacagcttgcttccaatacagtcccctctcttcacatggggctgcctgagatttttccaggtggggtctaggtagcattgcttatgcttgaaagactctctgttctccaaagcacccgtttcaggctctgtgacgccgaatggctctgtgacaccttctcctttggcttgtgctgagaggaaacctgtactttccttttcctgacccagttgcacagcccttagtcccttcttcctccacccaaaagatgagggtgccagataattccactcactctctatttggaggtttcctgtggattattgtaaatgtgcgctaaccaatttcataccctttattattttttaaataatgtaacaggtcaccttgggctgcagggacacttggcaaccatttttacagcttttaacttttggtgcccgggccgggtgtggtgtggtggcccgtgcctgtaatctcagcactttgggaggccaaggcaggtggatcacctgaggtcaggagttcgagaccagcctggccaatatggtgaaaccctgtctctactaaaaatacaaaaaattagccgggcatggtggcgggcacctgtaatccctgctgcttggaaggctgaggcaggagaatcccttgggccagggaggtggaggttgcagtgagccaagatcatgccactgcactccagcctgggcaagaagagcaaaacttcatgt

SEQ ID NO: 4383 - DNA, 2405 bp, Homo sapiens
gctgtaagcgccggtcgcggctgtgtcggtcgccgctgctcccgctcctgctgggagaggtttcaggagtcagtgaccttcaaggatgtgtccatagatttctcttgggaagagtggattcaagcagattctgctcagaggatgaccgtgtatggggaggtgatgctggagaactacaggaacccggtctcactgggaaatcacctttccaaacccaatgggacttcccagctggaacgagaactgagtctgatgcaaaaagaaccgcgtgagggtggctttcgagattttcttggatattgctgtcagattaatctgacatttagtcctctcattatcctgtcccagtcaaggggagaaagtattgactgagtgctgtgctcagctcttccacagccagcatcttacttacttgacacaaaacatctatagactgggagacaagacttgaaaccaaagagccaactccgaagccgggtattactgaagatttatgccatggggtaacaatggaaagggaaggtatctggcattctactctaggggaaacctgggaacctaataattggttagagggacaacaggatagtcatctgagccaagtgggagttacccataaggaaaccttcactgagatgagagtatgtggaggtaatgaatttgaaagatgttccagtcaggattcaatccttgatacacagcaaagcattcctatggtaaaaaggccccataactgtaattcacatggagaagatgccacacaaaattctgagttaattaaaactcaaagaatgtttgtaggaaagaagatctatgaatgtaatcagtgcagcaaaaccttcagtcagagctcatcccttcttaagcaccagaggattcatactggggagaaaccctataagtgtaatgtatgtgggaaacacttcattgaacgatcctcccttactgtacatcaaagaattcatactggagagaaaccctataaatgtaatgaatgtgggaaagcctttagtcagagcatgaatcttactgtccatcaacgaactcacactggagagaaaccctatcagtgtaaagagtgtggcaaagccttccataagaattcatctcttattcagcatgaaaggattcatactggagagaaaccctacaaatgtaatgaatgtggtaaagcttttacccaaagcatgaatttgacagttcatcagagaactcatacaggagaaaaaccctatgaatgtaatgaatgtggaaaagccttcagtcaaagcatgcatcttattgtacatcagagaagccatactggagaaaaaccctatgagtgtagtcaatgtggaaaagcctttagtaagagctcaactcttaccctacatcagcgaaatcacactggagaaaaaccttacaaatgtaacaaatgcgggaaatcctttagccaaagtacatatcttatagaacatcagagacttcattctggagtaaaaccttttgaatgtaacgagtgtggaaaagctttcagtaagaattcatctctaactcaacatcggagaattcacactggagagaaaccttatgagtgtatggtgtgtggaaaacatttcactggacgatcatcccttaccgtgcatcaggtcattcacactggagagaaaccttatgagtgcaatgaatgtggaaaggcattcagccagagtgcttaccttattgaacatcaaagaattcatactggtgagaaaccctatgaatgtgatcagtgtggaaaagccttcattaagaattcatcccttacagtgcatcagagaactcatacaggagagaaaccctatcagtgtaatgaatgcggaaaagccttcagccggagtacaaaccttacacgacatcaaagaactcatacgtgaggaatgttttcactggcccttacctcatgattaactcttcagtaataatcatatgagacatacaatgtagaaacctaataaatgtaatgattgtgggaatctttcagttgaagtacaatatatcatatcagataataccactgcagagaatccatctaaaagtagagaaatcttgattcagaatgtataatttcctttatatcagaaggtttaaatagctaatataaacaatgaagagtcatgctgaagataagttctgttatatcataccgcacattctcctttggccatcagagactttacactggagagaaaaatgtgagagtgtttaactggacagcccagagacctggtacgtagtcctaatctgccactgccttggacaacttgcctacttccaccaggttatggttctttatttggtaaatgaatgattttggagttagaaatcttgtaggagctctgttagctctaaaatgctacaactctataaatataatgaatgctggg

SEQ ID NO: 4384 - DNA, 2138 bp, Homo sapiens
tacttttgtcatggatgagatggaaggttccatttgctttcccgtgctggataaccagagagctgattttagggtcattagatggcaataaagactccccacccccacagcacatgctccaccgacttccctcagtaggcatttcactatattaaagacgcaaactggctgatgtaaccattgctttgaagccatgaaatggaatgtcagttgcagaaagtgagccacatatttctgagatattgattattgcaatataaatcttctcacccctaaggtaaaatcctagctggtgctgtgagctacttgataatcatgacattgggcttttcttgggttttgatttttatgttttattcctattaggcaaagaccaggcaagagggagaagaccattgaaagaggtgcggtgggagtggaggtggggatgcacatcacagaggaggcaccaagagtgggggcttgcctcgatatagaaatgtagcaactctggagaattggtgtcacagggcagagcataaaagcaggacattatttcctcggaaaagtgtctttttaaaacatgatttgtttcattttgcagtggaaagggttggacagatgtgcattcaaattctccctccttttcttgctagtgtatgacctgagcaagttatttaacccctcagagtctggtgttccttatttgtgactcagagatagtaatacttcctaccatacagattttggtggaaagtaaataatagaactatgtgaagccctagcaaagaatctgtcacacagtgggtgtttggcacctactgtcaccgatcttctgtgcaaacccctccccgcagctgctcctgttccaatcactctgggaacactggactcatgacaattgccactccctttgtgtgccttatatttgcccattcccaagtcttcactgattttattccctattctaggcatctccagatgcctacatcctacccgtgctcaaagacacatttcaaatgcccactcctctgggaaatgcctgttgtacccctggacacaaatcatctctcctccttagagccaataacccatgctccaacacccatttcaaatgcctactcctccaggaaatgccccagtacccatggacaaaaatcatctctcctccttacagccaatacagcagctcaccaggcatgggctctttcacatgtattatctattacacttacagatctgtggcctatttaccctcactgagcctcagtttcttcatcaaatggtgataataaaaatatccacttcatgaggtagtggcaaggatcaagttgctaatgcatgcatagttgcagccatatagagctctgtagatggtagtgatattgatggattattattattagtatatctagatatgatctctagttagaaaatgcagtctccttggttgcttgcttctagaaaggatgcatgcagtttctagaaactggtgtctttttctatggtcacacctcacttgttaagggcttcagttgtaaatagcatcagtggtaaatccaataataagtgcctgaagggtagagacctgtttggattttggttgtggatgatgtctatatatcagtttaggaccctacgccttgcttccacggcacagcaaatgttcattacacttgcagagccactgagaaatgcaaatacttgaaaactggacagcaatgtgaaataccaaatgcatagtcattaactgacaaaactaggagctttgatgaatagaataaatgattgaccttcaagatgggagcaaggattaggtaatcttgggaggaggaagaagcagtgaaatgaaagcccctgggaattcttccatcatctcccaacaaatatacctgtgaacaaaaggtttcccacttttatgtcatttatcttttcagtttttttaaatgattttcagattcaaccaaattcttaggagagatattaagaggtttataatttagataatgggacacattatgtattcctagtaaatagcactaagctatgcactactgagtttcaacatcaatagattctaactgccaacccaggcaactgtcacttggctgctcccagggtggttggcccataaaacttgcaatatgaatcacacactc

SEQ ID NO: 4385 - DNA, 1825 bp, Homo sapiens
tatgcttcatccccggtgccgttcaatcccaggtcgttttccctttcagctgcaatgccgggattttaaatagcagagatgaaaggcccctgcccccacctccctcctcccctgagttcatgtattatgaatgaaacggcagcctcgctgcttcctgaggtgctccacttcaggctggggtgcaatggctcgatctcggctcagtgcaacctctgcttcccgggttcaagtgattctcctgcgtcagcctcccaagcagctgtgaatacaggttggagtgcagtggtgctgtgtctggagtttgttcctgccgttgggtttgtggtcttgctgacttcaagaatgaagccacggaccttcacgagaaatattacgttgtatggatgtaccactgtttgtttatccattcttcaggtgaaggacatgtgggttgtgcccagcgcgggctgaataaagatacacacacaggcacattggaaacgcagtagaaaatggctgccaatttaaaaccagaagttaagaagagcaaactcgaatgtacagcaagagagcttcaggctggactggcttccagcagaagtgggactggaaacctcggattctattgtctcttctctgtgaagtgggaaaacatattgctgagttgagtaaatatttccttccataaaggtgaagccttgatgactgtggtttgaattcactgggaaaagtggaatcgtcaagagacccgggctaactaaatccctctgggagcctcagcagctgaggccatcactcaaaattaagctcaactcagctgtacttctcaccacgtggcaaaggatggaccaaaggctgggagcaactgggagtgtctgggaacactttctggttgtcacagtgatcagcagccaggagcagcctgcaatgtgaagacagtcctgtgggacagtcctaggctacagggaactgtcctgcatcctgcatgtcttataaacatcctactggacgtcgatgtttgactgtgccccaaggaagccacacaaactgtgtagccagacagtctgtctgggaggagaaggaaggaatttatctaccagctcccatctctcatggaccaaattcttccccactgtactccagcctgggtgaaagagcaagatgtcgtctcaaaaaaaaaaaaattgtttactttccagtgtcattttaacttgttactagtgagcatctggcctgggtgttttccattagcatgaaaattcagaaggctacagaaggaaatacctataattgagcagcgagagagccacttcattctgtggccaggcaatatgtcttgcatttctctagtgtaaataaaatgatgattcaaagaatggtccccattaatgagtatctgatttagaataaaacaaaatccatgctgggaagttgatgagcttgattttgctgaattgctttgagcttgcagcttatatttattggttctttcctttcgacaattgtcaccagttgtctgctgttctttcgggagagggcttgaaggttgattttagttccctgtaactggaggtgacatgtgaaagctcaaagctattgaaaagttgcaaaggcttccacacacaactgcagtagggagggcgcaggaagtgggtcaacgcttttggaggactgggtgaagttcaggatcctgaggccctactttttggtcgcccagggtgagagctgaatgtaggctccaacaggaagacggcattgaagcctggttgcttgttactactcagaatgccatctacaaaaggaaattatgtaaaaagcaataaagaaccccttttgttcttgcagg

SEQ ID NO: 4386 - DNA, 1981 bp, Homo sapiens
aattgaaattttaccaaaaggaaggaagtggacagaaatggatttgcaccattctgtccaaccagagtccttgctcctaagcacagcatcattttccttctcgttaattatcccttttaacagcaacaaaatgacctggccggcacacgagaacacagagatgaggccacaccttgtaatttctggggttctgagggggaccctggtggtggttctgggtgctgcggttctttcagtaaagaacttccaggagtttctaatcagctgctttcatcaagattctcataaccttctcctgctgccgctttcaagtgggtttgttcccgagcacattattaggaaagcggctataataactgcttacctgcctccggctccgctccacaaacacccgccaagcccacactgtgcaaaacagtagtaacacgcccgcctgagaatggctccgcggctccgcattgctgcctaagagctttcctgcatgtgatctcatttcatcctcaccgcaactccgggccggggaactcatgtccccggtgaggaagtccaggcttgagatcggcctcaacagtcggaggtggcaaagccagggcttgctcgaagccccaccttctcactgttggggagcaggctgactccaagctgtggaatcctgtgcaggggttattttggtatctgtggggtaatttcacactgaggctaagtcaccgttttgggttcagatggacatgaaattgaatctcagggatccaactttctagcaatgtactctggagcaaatttggtattttcctcatctgtaaaataggaacaataaaagtacctttttttttttttttttgagttggagtcttgctctgttaacccaagcttcagtgcagtggcgccgtcttggctcactgcaacttctgcctcccaggttcaagtgattctcctgcctcagcctcccaagtagctgggattacaggcacctgccaccatgcttggctgatgtttgtatttttagtagagacaaagttttgccacgatggccaggctggtctcaaactcctggcctcaagtggtctgcccgcttcagcctcccaaagtgctgggattacaggcatgagccactgtgcctggccaaaaataccttctggagagtgttgctggagttacagatgatatgttattgtgatatggtatcagcaacagtcatctcagaaggtgcagcatcttggaaaattttcttgtgtgcgcttcatctactgtctcagatagagtcactatacattcaaaagtacagatcttcctccactagctaacaaagtcacctccttatcctcaagtctatgttcccagttcaggatgggcctgggtgatgcctcattccccatggctccagggcctctgatgctgccactttgtcagtggctggctcagctcaggcaaggcccctctcccagctaaccatagcataagcctgaatcgatccctgtctcagggccatttggaggattaactaatccatcatgggggaaacctttgaaatgtgccaatgtggctgaggctattgtcaggcagagcagaaactgagtttactggttcccccgtttccgagactttcaagctggactcactctcatgtgggtgaaatcccagcaggtgcaggttgcactgagctcaccaagccgtctatctgccccacctgacgctggatctttttgacctatctctgtttctttaagggacagtaagggtgagaagataaagggatcaggattccagacactgaagagcttttgtttgtgtttttaatagaactgaacacattaaatttccccttttggcatcatcagtctatggactgaaaacatagttctgagattatacctttccgattttatgttttgcaaatctcgaaggtccctggaaatctacagggtacatcttttttcaccctctgagatgtgagctccataataataaaacctaactcagc

SEQ ID NO: 4387 - DNA, 2296 bp, Homo sapiens
taattaccattgttcctggcacagacttcaccccatcctctcaccttatacccagcaccaaacctgaatctcatgattgtatctccctaatccatgtggcatcctccccatttccccatatttccctctttcctgttcctaatccagaccacacttggtttattgatggtagttcttcaaggcccaatcatcagtcaccagcaagggcaggctatgctgtagtgtcttccacatctgtcattgaagctactgccttgcccccttccactacctctcaacaagccaaactcattgctttaaactgggcccacacccttgcaaagggactatgtgtcaatatctacactgattccaagtatgccttccacatcctacatcaccatgctgttatatgggcagaaagaggttttctcactacacaagggtcctccatcatcaactgcctttataaaaatcctccttaaggctgctttactgcccaaagaagctgaagtcattcactgcaaggggcatcagaggtcaccagatcccattgcttgaggcaacacttatgctgatatgcagcaaaagaagcagctagtattcccacatctgtccctcacagccagttttcttccttctcatctatcactcccacctattctcccactgaaactattacctattaatccattcctactcatgaaactattacctattaatccattcctactcaaggcaaatggttcttggatcaaggaaaattcctccttcctgcctcacaggctcattctatcttatcatcctttcagaacctctttcatgtgggttacaagccaatggcccatctcttagaacctctcatttcttttccatcatggaaatccatcctcaaggaaattacttctcagtgttccatctgctactctaccaccactcagggatatctcacgccccctccctttcctacacatcaagctagaggatttgccccaacccaggactggcagactgactttacccatatgccccaagtcaaaaactaaggtaccttttggtctgggtagatacattcactggatgggtagaggccttttccacagggtctgagaaggccaccacagtcgtttcttcccttctgtcagacataattcctcggtttggccttctgacctctatatagtctgataatggaccggccttcattagtcaggtcacgtaagcagtctcccaggctctcagcatccagtggaaacttcatacccccttaccatccttcatctttgggaaaggtagaaagaactaatggtcttttaaaaacacacctcaccaagctcagcctccaacttaaaaaagactggacagcacttttaccatttgccctccttagaattagagcctatcctcaagaagctacaggatatagtccatttgaactttcatacggatgtactttcttgctgggccccaacctcttgacagacaacacttatgctgatatgcagcaaaagaagcagctagtattcccacatctgtccctcacagccagttttcttccttctcatctatcactcccacctattctcccactgaaactattacctattaatccattcctactcatgaaactattacctattaatccattcctactcaaggcaaatggttcttggatcaaggaaaattcctccttcctgcctcacaggctcattctatcttatcatcctttcagaacctctttcatgtgggttacaagccaatggcccatctcttagaacctctcatttcttttccatcatggaaatccatcctcaaggaaattacttctcagtgttccatctgctactctccacccttatcacaacacaagaacacctctgattactcctgccatcatgacccttggccataatatgatttatctccacactagcagagaccaaccgaacccccttcgaccttgccgaaggggagtccgaactagtctcaggcttcaacatcgaatacgccgcaggccccttcgccctattcttcatagccgaatacacaaacattattataataaacaccctcaccactacaatcttcctaggaacaacatatgacgcactctcccctgaactctacacaacatattttgtcaccaagaccctacttctaacctccctgttcttatgaattcgaacagcatacccccgattccgctacgaccaactcatacacctcctatgaaaaaacttcctaccactcaccctagcattacttatatgatatgtctccatacccattacaatctccagcattccccctcaaacct

SEQ ID NO: 4388 - DNA, 1693 bp, Homo sapiens
cagaaggcatgcttagagggaggatggagagggaagggtgatggcttctggagggttgactaattttttaatctgttctccagacccaactgtaaggcttcccctgaggcatcaagtctctatctagccctggagtcttggttctggggttgatgagttgcagacatagctttcctctcctcctaccctgttccctccactctcatgcctttctcagttcatgccatggtgacctttgcccactgacctcacacacagcctgttttctagcctgcgttcctccccaggcaggcggacacttccagtcttcgtttacaccctgcgtcagagtgataaaccaaatatgggcacctgtcctgcatccactgtgccataacagcccttgcccacctaatcttccaggaacccggtttggggccatgctggacatgctgacggaccgctgctccaccatgtgcctgttggtcaacctggccctgctgtaccctggagccacgctgttcttccaaatcagcatgagtttggatgtggccagtcactggctgcacctccacagttctgtggtccgaggcagtgagagtcacaagatgatcgacttgtccgggaatccggtgcttcggatctactacacctcgaggcctgctctgttcaccttgtgtgctgggaatgagctcttctactgcctcctctacctgttccatttctctgagggacctttagttggctctgtgggactgttccggatgggcctctgggtcactgcccccatcgccttgctgaagtcgctcatcagcgtcatccacctgatcacggccgcccgcaacatggctgccctggacgcagcagaccgcgccaagaagaagtgacgctggagccccgggtcctggctgcccacctgccctgggagtcttgctgtgccacacagctccccaccccctgctaggaggtcccagtctcacgccttcctcatgtgttgttctacctgctgggatgggggtcagcctctctttggtgacgtcacgttctctgggatcctgaggacccgggcctcaaatcagggaggatacgcgggaggccccctccatccaggcggtgctcctggggtgccgggaccgggcagtgtcacaccctgcctgctcagtcctggggtccgagatgctagggacgcttgagtgagggaggtggtgtgagggccaggtttcctgaaaggcgggagtcagacctccgcccccagccagagcaagcttggggcaccatgcccaggagggaagaagccatccacagccttccctgtcaccggctcctctgtcctgcctaccctggtcctggcgggacttcactatttgacttggtttcctttcagatattcttggctcagggcctgggttgagggagcttagggaaggacgtccgtctgggtgcttttcctccagtttgctggctggcttctccgtctacccacagtgacctcacagagaggccctcctgccacccatgctcatgtggtgtccccaccgcccacttgtttgatgtcactgactgtctacatgtatttatattcttgatattttctaccctcactagaatgtaaactccatgaaggcacagacttttcttgttctcttctctatccctagagtaagaccaacttgaacctggcatatagtagctgcttaataaatactcgtctgtc

SEQ ID NO: 4389 - DNA, 1650 bp, Homo sapiens
gttattctctgagtccttacatagaattgaagaccacctgcctgtttgtctttgcctgtttccttttcttctgttcttaactcctctccagctcctgaatagcaattttgtttctctctgcctcatgcaacagacttttctggatgattcgccccatcccccgtcatgccaagcctctgccccacttcatttctctttcagtgagtggagcctccgccgtctcccagacctattgttgcctggaccctctcaagcctaccccttcctctcctccctcccctcctttactccgtccctttccatggagccacactcggggcaagaccatctgctctggccttccgagggcttccgcactgctggcggatgctccccacgtcccctagaatggtttgtgatctttctctgtctggtcccaacatgcctttccagcctcctccctccccacgccagcagttaacccacacatccatccaggagatttcccacacagactgcacataccgcacaggtgtgacctgctggtgatgatctgctttctctaaaatggactttcccttctgtctgcacttgctgatcaacaaaaagcctgctgggcctttaagacaggcctcaaaccacctctgctgtgaagcctgcccttcctcgtcaagaccccaaacgaggctcacctccccgtgaccgtgcagcgtgctgctggtcctgccaacggtgcccctcacggagcggtggttggtcctgtgtttacctcttcggcctttccacccctccagaggtccgcctcttgtctccaggtctttgtatctaactgcccagttggacactcaccaacctgaatgccatgtggtgttctggaaagcttcctctgtaatttccagttcagatcagttgttcatcctgtgcactccagtctcatcctgtgcttaattctaccacaacaaacaacgcagtattaaaattgtctgtgcagctttctctgcagtctggaaagacctcgaagagaacagacctgccttatttactgtgcgagtatccagctagagcctagagctcagtaaatatctgtgatttcactctttctctttctccttccatcccttcccctgtcctcctctccctttcttctttctttccttctttctttcagcacacatcagtacaattccacacaatggaaagagaagagtgaacaaggcaggacatttagaagggaaagtggaggagcaaagtgaggaaatcttatcagaaaaggggtgatcagcaatgtttaatgttgtcacaggcaagaaatatgcaggcaaaaaaatcctttacattctgtaactaggatgttgcatggagatttatataaagagtgttgggctgggcacagtggctcatgcctgtgatcccagccctctgggaggctggggcgggcggatcgcctgaggtcaggagttgtagacgggcctggtcagcgtggtgaagccccatctctaccaggaatacaaaaattagctgggcactgtggcgggcgcatgtagtcccagcttctcggggggctgaggtgggagaatcgcttgggcctggggggcggaggtttcagtgagccgagatggcgccattgcactccagcctgggcaacaagagcaaaactccatactccgtctc

SEQ ID NO: 4390 - DNA, 1520 bp, Homo sapiens
caaattcatattcaggaaatgaagagaaccccaaaatatacttcacaagaaagtcatccctaagacacacaatcatcagattcaccaaggttgaaatgaatgaaaaaaaaaaaatgttaaaggtagctagagagaaaggacaagtcacctacaaagggaagcccatcagactaatggtgggcctcttagcagacaccctacaagccataagagatttggggcctatgttcaacatttcttttcttttcttttcttttctttttttttttcttgacagagtctcactctgtcaccaggccggagtgcagtggcatgatctcggctcactgcaacccccacctcccaggttcaaacagttctcttgcctcagcctcccgagtagctgggactacaggcgtgcaccatcacacctggctaatttttgtatttttagtagagatggggtttcaccatgttggccaggatggtctcgatctcctgacttcatgatctgaccaccttgaccccccaaagtgctgggattacaggtatgagccactgcacctggccaacattcttaaagaaaataaattccaaccaagaatttcatatctagccaaactaaacttcataagtgaaggagaaataagatgcttctcagacaaggaaatgctgagggaatttgttaccaccagatccaacttgcaagagctccagaaagaagcactgaatataaaaaggaaagaatattacgagccactacataaccacactgaagtacacagaccagtgacactatagagcagttacacaaacaagttgacaaacagctaacaacatgatggcagattcaaattcacgcatctcaatattaacctctaatgtaaacagactaaatgccccaattaagaggcacagagtggcaagccagatgaagaagcaagactcagtggtatgccgtctttaagagacccatctcacatgcaatgacactgataggctcgagataaaggaaaggagaaaaatctgtcaagcaaacggaaaatagaaaaaagcaggggttgccacatgcccatcaatgatagactggataaagaaaatgtggcacatatacaccatggaatactatgcagccataaaaaggatgagttcatgtcctttccagggacatggatgaagctggaaactgtcattctcagcaaactaacacaagaacagaaaaccaaacaccacatgttctcactcataagtggaagttgaaaaatgagaacacatggacacagggaggggaacatcacacactggggcctgtcgggggtggggggctgggggagggatagcattaggagaaatacctaatatagatgacaggctgatgggtgcagcaaaccaccatggcacatgtacacctatgtaacaaacctgcgcgttctgcccatgtatcccagaacttaaagtataatttaaaaaaaaagaaaaagagaaaagcaggggttgcaatactaatttcagacaaaacagactttaaaccaagaaaggtc

SEQ ID NO: 4391 - DNA, 5188 bp, Homo sapiens
tgtatctgtccttttattaattaattactttatgtatttatgagactgagttttgctgttgtcacccaggctgaagtacgatgctgcgatctcggctcactgcaacctctgcctctcgggtacaaccgattctcctgcctcaggcccctgagaagctgtgattacagatatgcaccaccacacccatttaattttgtatttttagtagagactgtttctttttgttggccaggctggactcgaactcctgacctcaggtgatctgcccagctcatcctcccaaagtgttgggattacaggcatgaaccaccatgcttggcctatctgtttttactacctttactggagaactttatttatttatttatttatttatttatttatttatttatttatttttattattattatttttgagatggagtctcactctgtcgcccgggccggagtgcagtggtgtgatctctgctcactgcagcctccgccttctgggttcaggcggttctccttcctcagcctcccgagtagctgcagctacaagtgtgcaccactacgcccggctgagttttgtgtttttggtagagatggggttccaccatgttggttggccaggatagtctcaatctcctgacctggtgatctgccagcctcagcctcccaaggtgctgggattattggcgtgaaccaccacaccaggcctggagaactttatatatgcttgtggattggagttactctttagccttctttcatttcttttttttttttctttgagacagattttcggtctgtcacccaggctaaagtgcagtggtgtcacctcggctcactgcaacctccacttcccaggttcaagcaattctcctgcctcggccttccaagtagctgggactacagatatctcttccaaatgcatgatgaagacattcttctcaacagggcaaggcgatacagaagcgttccacacagggacattgcaaagacaagcaagtcatcacattggagatttttgcttccagaaaattgagaaagacattcatggcttccagtttcagtggaaagaagatgaaacaaatgaccatgcagcacccatgacagaaatcaaagagttgactggtagtacaggccaacatgatcaaaggcatgctggaaacaagcatattaaagatcagcttggattaagctttcattcgcatctgcctgaactgcacatatttcagcctgaagggaaaattggtaatcaagttgagaagtctatcaacaatgcttcctcagtttcaacatcccaaagaatttgttgtaggcccaaaacccatatttctaataagtatggaaataattccctccattcttcattactcacacaaaaacggaatgtacacatgagagaaaaatctttccaatgtattgagagtggcaaatcctttaattgtagctcacttttaaaaaaacatcagataacccacttagaagagaaacaatgtaaatgtgatgtatatggcaaggtatttaatcagaagcgataccttgcatgccatcgtagatctcacattgatgagaaaccttacaagtgtaatgagtgtggcaagatctttggtcacaatacatccctcttccttcacaaggcgcttcatactgcagacaaaccttatgaatgtgaagaatgtgacaaagttttcagtcgcaaatcacaccttgaaacacataagataatttatactggagggaaaccatacaaatgtaaggtttgtgacaaagctttcacatgtaattcatacctagcaaaacatactataattcacactggagagaaaccttacaagtgtaatgaatgtggcaaggtttttaatcgactgtcaacccttgcacgccatcgtaggcttcatactggagagaaaccttatgaatgtgaagaatgtgaaaaagttttcagtcgcaaatcacatcttgaaagacataagaggattcatactggagagaaaccatacaaatgtaaggtttgtgacaaggcttttgcatataattcatacctggcaaaacatagtataattcacactggagagaagccttacaagtgtaatgaatgtggcaaggtttttaatcaacaatcaactcttgcacgccatcatagacttcatactgcagagcaaccatacaaatgtgaagaatgtgacaaagttttcaggtgcaaatcacaccttgaaagacataggaggattcatactggagagaaaccatacaaatgtaaggtttgtgacaaggctttccggagtgattcatgccttacagaacatcagagagttcatactggagagaaaccatacacgtgtaatgaatgtggcaaggtttttagtacaaaagcaaaccttgcatgtcatcataaacttcatactgcagagaaaccgtacaaatgtgaagaatgtgagaaagttttcagtcgcaaatcacacatggaaagacataggaggattcatactggagagaaaccgtacaaatgtaaggtttgtgacaaggctttccggagggattcacacctggcacaacatcagagagttcatactggagagaaaccttacaagtgtaatgagtgtggcaagaccttccgtcagacatcatcgcttataatccatcgtaggcttcatactggagagaaaccttacaagtgtaatgagtgtggcaagaccttcagtcagatgtcatccctcgtataccatcataggcttcatagtggagagaaaccttacaagtgtaatgaatgtggcaaggtttttaatcaacaagcacaccttgcacagcatcagagagttcatactggagagaaaccttacaagtgtaatgagtgtggcaagaccttcagtcagatgtcaaaccttgtataccatcatagacttcatagtggagagaaaccttaaaagtgtaatgagtgtggcaagaccttcagtcagatgtcaaagcttgtataccatcatagacttcatagtggagagaaaccttaaaagtgtaatgagtgtggcaacaccttccatcacaattcaacccttgtaagccacaaagccattcatactggagagaaactttacaagtgtaatgaatgtggcaaggtttttaatcaaaagacaacccttgcacgtcatcatagaattcatactgcagagaaactttacaaataggaagaatgtgacaaagttttcggttgcaaatcaaaccttgaaacacataagaaaatgcatactgaagagaaaccacacagatgtaaggtttatgacaagatttttgaatataattcatacctggcaaaacatattagaattcaaactggagagaaaccttacaaatgtgatgagtgtggcaacacctttggtcaaaattcacaccttgtaattcaaaaggcaattcgtactggagagaaaccctacaagtgtaatgaatgtggcatagtttttaatcaacagtcacaccttgcaagtcatcatagtcttcatactgcagagaaatcttacaaatgtgaagactgtgacaaagttgtcagtcacaaatcacagcttgaaagacaggagaattcatactggagaaaaaacatacaaatgtaaggtttgtaacaaggcttttgggagtgattcacacctggcacaccatactagaattcacactggagagaaaccttacaagtgcaatgagtgtggcaaagcctttagtgggcagtcaccacttattcaccatcaagcaatccatagtatagggaaacttgactaatataatgattgtcacaaagttttcagtaatgctacaaccatttcaaatcattggagaatccataatgagagatcttacaagtgtaataaatgtgacagatttttcagatatcgttcatatattgctattcatcatcgaactcatgctggagagaaaccttataaatgtcatgattgtggcaaggtcttcagtcaagtttcatcctatgcaaaacataggattcatacaggagagaaactcacaagtgtgatgattgtggcaaagcgtttacttcacattcacacctcaatagacatcagagaatccatgctggacagaaatcttacaaatgtcatcagtgtggtaaggtcttcagtccgagatcactccttgcagaccatcagacaattccttttggagacagttgtttcaaatgccattagtatagcaagccatcaagcattaattgacattacagttaaatgagcactgacctgagtttgagttgacttaacattgagtttaagcattaattgacattaaactgtttatgttaagaggactgggctgggcactgtggctcacgcctgcaatgccagcactttgagaggccaagactggtaggtcactggaggttaagagtttgagaacagcctggccaacagacgggagccacttttcccagcctgtgttttcatttctattctttctttcttttttcttttttttgtttttgtttttgagatggagtctcttgctctgtcatccaggttggagtgcagtggcatgatcttgactcactacaacctccgcctcccaggttcaagcgatcctcctgcctcagtctcctgactagctgggactacaggtgcgtgccaccacacctggataattttttgtatttttagtagagactgggtttcactgtgttagcctggatggtctcgattttctgatcttatgattcacccacctctacctcccgaagtgctgagattatgggcgtgagccaccgtgactggcctgttttttgtttctttaacaaaaagttatggggatttctatgagtattgtgttgaatctaaatcacattcggttatataatcattgagcaatactaatttttccaatcaatatggattgtatgtgtatttatatgtttttaatcattttgatcaatgtttgtagatttcaaggtacaaacttctcacctttatatgtttattcctaaatatttcttactttaagctctttagcaaatggaagtggtttttaattttattttaaaattatttaatgttaatgtatggaaattcaactaatttttggtgctattattctattctgcaaatacactgaatatgtttattagttccagttgtattttggttgactgtgatattcttcacagatcatgtcatctacaaacaaataaaatttgacttctttctttctg

SEQ ID NO: 4392 - DNA, 3366 bp, Homo sapiens
agctgaggagggagggactgaggagccgggcacccagagtggatctgggggaaagaggtggaaaagtgacagagggaagacagcctccaagctcagaggcagagagagggaggaggacaggtgagcggaggcacagaatagaaagagaaatggaaagagacctgccgagggagacttggaaagagggaagccagggtggaggagttctgacagagagagggatctaaacagagacatgccgagagcaacctgggctaacagcaaagagagaagttgggcagagtcagagaggggcccaagagacacaggaaatgggggctcaaaagcggaaagacatatccaggagatagagactggacggggtggggacagggccaaggcccaccgcaggcagaggatgaggctcagaggaacagaaagagccagtctgggaccaggacggaggcttggagacagcaggggcacggacatgccaggggcccgggcccagggccttgctgccgccatgactgaggaatcagaggagacagtcctgtacattgagcaccgctatgtctgctctgagtgcaaccagctgtatggatcactggaagaggtgcttatgcaccaaaactcccacgtgccccagcagcactttgagctggtgggcgtggctgatcccggagtcactgtggccacagacacagcttcaggcacgggcctctatcagacccttgtgcaggagagccagtaccagtgcctggagtgtggtcaactgctgatgtcacccagccagctcctggagcaccaggagctgcacctgaagatgatggcaccccaggaggcagtgccagctgagccatcacctaaggcaccacccctgagctccagcaccatccactacgagtgtgtggattgcaaggctctctttgccagccaggagctctggctgaaccaccggcagacgcacctccgggccacacccaccaaggctcctgcccctgttgtcctggggtccccagttgttctagggcctcctgtgggccaggcccgagtggctgtggagcactcataccgaaaggcagaagagggtggggaaggggcgactgtcccatctgccgctgccaccaccactgaggtagtgactgaggtggagctgctcctctacaagtgctctgagtgctcccagctcttccagctgccggcggatttcctggagcaccaggccactcacttccctgctcctgtacccgagtctcaggagcctgccttacagcaggaggtgcaggcctcgtcacctgcagaggtgcctgtgtctcagcctgaccccttgccagcttctgaccacagttacgagctgcgcaatggtgaagccattgggcgggatcgccgggggcgcagggcccggaggaacaacagtggagaagcaggcggggcagccacacaggagctcttctgctcagcctgtgaccagctctttctctcaccccaccagctacagcagcacctgcggagtcaccgggagggcgtctttaagtgccccctgtgcagtcgtgtcttccctagcccttccagtctggaccagcaccttggagaccatagcagcgagtcacacttcctgtgtgtagactgtggcctggccttcggcacagaggccctcctcctggcccaccggcgagcccacaccccgaatcctctgcattcatgtccatgtgggaagacctttgtcaaccttaccaagttcctttatcaccggcgtactcatggggtagggggtgtccctctgcccacaacaccagtcccaccagaggaacctgtcattggtttccctgagccagccccagcagagactggagagccagaggcccctgagccccctgtgtctgaggagacctcagcagggcccgctgccccaggcacctaccgctgcctcctgtgcagccgtgaatttggaaaggccttgcagctgacccggcaccaacgttttgtgcatcggctggagcggcgccataaatgcagcatttgtggcaagatgttcaagaagaagtctcacgtgcgtaaccacctgcgcacacacacaggggagcggcccttcccctgccctgactgctccaagcccttcaactcacctgccaacctggcccgccaccggctcacacacacaggagagcggccctaccggtgtggggactgtggcaaggctttcacgcaaagctccacactgaggcagcaccgcttggtgcatgcccagcacttcccctaccgctgccaggaatgtggggtgcgttttcaccgtccttaccgcctgctcatgcaccgctaccatcacacaggtgaatacccctacaagtgtcgcgagtgcccccgctccttcttgctgcgtcggctgctggaggtgcaccagctcgtggtccatgccgggcgccagccccaccgctgcccatcctgtggggctgccttcccctcctcactgcggctccgggagcaccgctgtgcagccgctgctgcccaggccccacggcgctttgagtgtggcacctgtggcaagaaagtgggctcagctgctcgactgcaggcacacgaggcggcccatgcagctgctgggcctggagaggtcctggctaaggagccccctgcccctcgagccccacgggccactcgtgcaccagttgcctctccagcagcccttggaagcactgctacagcatcccctgcggcccctgcccgccgccggggtctagagtgcagcgagtgcaagaagctgttcagcacagagacgtcactgcaggtgcaccggcgcatccacacaggtgagcggccatacccatgtccagactgtggcaaagcgttccgtcagagtacccacctgaaagaccaccggcgcctgcacacaggtgagcggccctttgcctgtgaagtgtgtggcaaggcctttgccatctccatgcgcctggcagaacatcgccgcatccacacaggcgaacgaccctactcctgccctgactgtggcaagagctaccgctccttctccaacctctggaagcaccgcaagacccatcagcagcagcatcaggcagctgtgcggcagcagctggcagaggcggaggctgccgttggcctggccgtcatggagactgctgtggaggcgctacccctggtggaagccattgagatctaccctctggccgaggctgagggggtccagatcagtggctgactctgcccgacttcctctttggcacctccattccctgttgctgaaggccctccagcatccccttaagcatctgtacatactgtgtcccttcctcttcccatccccaccttccacctcttagcactggtgaccccaaaaatgaaaccatcaataaagactgagttgccagc

SEQ ID NO: 4393 - DNA, 3550 bp, Homo sapiens
agatgcgaggcggcggtcagtaggtgccgaacccacggccaggcttccgtggccagcagccctagaggaatggccatcctgtccctgcgagcccctgggccctggcaggcgatgcaggtgggatgctatggaatatgatgagaagctggcccgtttccggcaggcccacctcaaccccttcaacaagcagtctgggccgagacagcatgagcagggccctggggaggaggtcccggacgtcactcctgaagaggccctgcctgagctgccccctggggagccggaattccgctgccctgaacgcgtgatggatctcggcctgtctgaggaccacttctcccgccctgtgctgcggcaggcgatcgaggagtgcaagcaggtgattctggagctgcccgagcagtcggagaagcagaaggatgccgtggtgcgactcatccacctccggctgaagctccaggagctgaaggaccccaatgaggatgagccaaacatccgagtgctccttgagcaccgcttttacaaggagaagagcaagagcgtcaagcagacctgtgacaagtgtaacaccatcatctgggggctcattcagacctggtacacctgcacagggtgttattaccgctgtcacagtaagtgcttgaacctcatctccaagccctgtgtgagctccaaagtcagccaccaagctgaatacgaactgaacatctgccctgagacagggctggacagccaggattaccgctgtgccgagtgccgggtgcccatctctctgcggggtgtgcccagtgaggccaggcagtgcgactacaccggccagtactactgcagccactgccactggaacgacctggctgtgatccctgcacgcgttgtacacaactgggactttgagcctcgaaaggtttctcgctgcagcatgcgctacctggcgctgatggtgtctcggcccgtactcaggctccgggagatcaaccctctgctgttcagctacgtggaggagctggtggagattcgcaagctgcgccaggacatcctgctcatgaagccgtacttcatcacctgcagggaggccatggaggctcgtctgctgctgcagctccaggatcggcagcattttgtggagaacgacgagatgtactctgtccaggacctcctggacgtgcatgccggccgcctgggctgctcgctcaccgagatccacacgctcttcgccaagcacatcaagctggactgcgagcggtgccaggccaagggcttcgtgtgtgagctctgcagagagggcgacgtgctgttcccgttcgacagccacacgtctgtgtgcgccgactgctccgcggtcttccacagggactgctactacgacaactccaccacttgtcccaagtgtgcccggctcagcctgaggaagcagtcgctcttccaggagccaggtcccgatgtggaggcctagcgccgaggaacagtgctgggcaccccgcctggcccgccaggacccaccctgccaacatcaagttgttccttctgctccggagacccctggggtgcggccctggccccctccacccctgctgggccagagcgggtgggcagtgtcaaggcccgctgtctcccaggtgcttgctgggactcggggcggctgcacctggctgtcacctgggtgtgctgctgtgaggggtccttgcgtggcccccatccttcccccaatgcagaactccatgggcagggagctggggggacatctcacctcccccatggcacagagccctccacacccctggaccagggcatccgggccctagaaattccacagctcccgtcctggccaccctggaagctcatcaggccaagacccggacagagcttcagaggagtgttgagtgacacctgaggatgcggctgcacacactcagccaagggccgagtctcacctgcggtggggtttcggctctgcctgggggctccatccctttcagccactcgtggccttggggatttctggttgtccccagctgggactgttcacagttgtcacctgcagacctgcctctccctggcctgaggttcaaaggcctcatcggatggtcagtacagtggggtcacctgttgtttctatacaacagcagggaaggggccatggagcttttccctgctgggtgctcctgctttggcccagcccacctttcctggtgctccaagctaggaggctgtggccccagcctgaggagggtgtcctggcctccaggtgtgcagcaggggctgtgtgctgggggaggttccagttaggcgatgggatcctgcagtggtctggtggcatttcttggaaccagatttacctgaggagctctgtcctgctccctgtggagggctccagatagctcagaaatgaccagccaatggccttttgtttgggggcctgaggtcaagagagctgagagtattcgctcgactgagcacattcaggaagatcagggcaggcgtgtgggaggtccctcactccacgggacagaggcccctggacagcagaggaaacctacagctctgggtgaggggacacttggctttggtgtttgcactttacagatcctgcggtccacgaggggcctcaggagaggacgtgtcaggacgtggcttcccagccttctgccttgggcagtgggggtgctcctgtctgtccttttcccccacaccctggactgtgcttggctgttggtgcacatggttggcacacggtgggcagagggcagagaatgccactgcttggttattggtcccctttgaccaggaaacccaagaggagacacctcagtcagcagaaaggccacctggctcactggctcattccaggagtgggagagacggcagggtctcctctttgtcctccggcatcaggaaggggatggtgtccactccccactgtggtggctttaggcaaggttcttattgtctgctctgcctcggtttccccatctggaaaatgggggcaggggtcctgacctacctcaggtggaacggtgagcagggaacatgtcggagtccttcagagaatgtgatgtgaggttggatcaacagtgtgggttcctgtcctgtttccccttcctctttggggctgaggaggaggttaaaggccaaatgctgtttcccaacaccccaaagtctgcacacgtctcatgaatgcatcacatttctgtcatatggatattagccattccgaaatctgtgtaatcaacttcacattattcaagttacaaatcactgtgtccatagaaaaactgtgctggtatttgctggacaaagggttgggcccccttttatttttacctgccacccagcatctcccccacctgccccttctgggtgacacagccggtaaacggaatcacgtatggttctttctgtgggtctgtggcacagcaggaagagcccggtgccgccagcaccttgtggaagaccacacatgggtggtcccacagcatgggaccaggctggcctgagggatgcccagttgtaacaatgctgctgtcactgtctcattaaatatacatccttt

SEQ ID NO: 4394 - DNA, 4212 bp, Homo sapiens
gctgcggggagggggctcgcgtcgccgtctccagccgctcccgatgaagcagctgcagccgcagccgcctccgaagatgggggatttctacgacccggagcacccgacccctgaagaagaagaaaatgaggcaaagattgaaaatgtgcagaaaacaggtttcatcaaaggaccaatgttcaaaggtgttgcttctagtcgatttttgcccaaaggcaccaaaacaaaagttaatttggaagaacagggacgacagaaggtgtcattcagcttcagccttacaaagaaaactttgcagaataggtttctcactgcacttggcaatgaaaagcaaagtgatactccaaaccctccagctgtacctcttcaggtagactcgactcctaaaatgaaaatggaaattggtgataccttatctactgcagaagaatcttccccaccaaagtcaagggtggaattgggcaaaattcattttaagaaacatctgcttcatgtaacatccaggccactgctggctactaccacagcagtagcatctccacctactcatgcagcaccattaccagcagtgatagcagaatcaacaactgtagactcaccgccctcatctccgcctccaccgcctccacctgcccaagccacaacactctcatcaccagcaccagtaacagagccagtggccttgccacatacaccaataacagttctaatggcagcaccagtacccttaccagtagatgtagcagttagatctctgaaagaaccaccaattataattgtaccagaatctttagaagcagatactaagcaggacactatatctaatagtttagaagaacacgtaactcaaatattgaatgagcaagcagatatttcctcaaaaaaagaagattcccatattgggaaggatgaagaaattccagatagttctaagattagtctgagctgtaaaaaaacaggttctaagaagaaatcctcacaatctgaaggcatctttcttggttcagaatctgatgaagattctgtacggacttcttcaagtcaaagatcacatgatttaaaattttcagcaagcattgaaaaggaaagagattttaaaaagagctcagcacctttaaaaagtgaggatctagggaaaccttcacgatctaaaacagacagagatgataaatattttagctattcaaaacttgaaagagatactcggtatgtatcttcccgatgtagatcagaaagagagcgacggcggagcagatctcactctaggtctgagagaggctctagaactaatttatcctattccaggtcagaacgatctcattattatgactctgatcgtcgctaccataggagctccccttatcgagagaggacgcgctattctcagccatacacagataacagagcacgagagagttctgactcagaagaagagtataagaagacatactcaaggcgtacctcatctcattcctcttcttacagagacctaaggacatcatcctattctaaatctgatcgggactgtaaaactgagacctcttacctagagatggaaagaagaggcaagtattcttcaaaactagaaagagaatctaaaaggacttcagaaaatgaagcaattaaaagatgttgttctccccctaatgaactgggattccgacgagggtcatcatattctaagcatgacagtagtgcttcccgttataaatctaccctttcaaaacctatacccaagtctgataaatttaaaaattctttctgttgtacagaattaaatgaagaaatcaaacagtctcattcttttagtttacagacaccttgttcaaaaggtagtgaattaagaatgattaataaaaatcctgaaagagaaaaggctgggtctccagctccatcaaatcgattaaatgattcacctactttaaaaaagctagatgaattgcctatttttaagtccgaatttataacacatgatagccatgatagtattaaggaattagactctttatctaaagtgaagaatgatcaattaagaagtttttgtcccatagaattaaatataaatggatctcctggggcagaatctgatttggcaacattttgcacttctaaaactgatgctgttttaatgacttctgatgatagtgtgactggatcggaattatcccctttggtcaaagcatgcatgctttcatcaaatggatttcagaatattagtaggtgcaaagaaaaagacttggatgatacctgcatgctgcataagaagtcagaaagcccatttagagaaacagaacctctggtgtcaccacaccaagataaactcatgtctatgccagttatgactgtggattattccaaaacagtagttaaagaaccagttgatacgagggtttcttgctgcaaaaccaaagattcagacatatactgtactttgaacgatagcaacccttctttgtgtaactctgaagctgaaaatattgagccttcagttatgaagatttcttcaaatagctttatgaatgtgcatttggaatcaaaaccagttatatgtgatagtagaaatttgacagatcactcaaaatttgcatgtgaagaatataagcagagcatcggtagcactagttcagcttctgttaatcattttgatgatttatatcaacctattgggagttcaggtattgcttcatctcttcagagtcttccaccaggaataaaggtggacagtctaactctcttgaaatgcggagagaacacatctccagttctggatgcagtgctaaagagtaaaaaaagttcagagtttttaaagcatgcagggaaagaaacaatagtagaagtaggtagtgaccttcctgattcaggaaagggatttgcttccagggagaacaggcgtaataatgggttatctgggaaatgtttgcaagaggctcaagaagaagggaattccatattgcctgaaagaagaggaagaccagaaatctctttagatgaaagaggagaaggaggacatgtgcatacttctgatgactcagaagttgtattttcttcttgtgatttgaatttaaccatggaagacagtgatggtgtaacttatgcattaaagtgtgacagtagtggtcatgccccagaaattgtgtctacagttcatgaagattattctggctcttctgaaagttcaaatgatgaaagtgattcagaagatacagattcggatgatagcagtattccaagaaaccgtctccagtctgttgtggttgtgccaaagaattctactttgcccatggaagaaacaagtccttgttcttctcggagcagtcaaagttatagacactattctgaccattgggaagatgagagattggagtcaaggagacatttgtatgaggaaaaatttgaaagtatagcaagtaaagcctgtcctcaaactgataagtttttccttcataaaggaacagagaagaatccggaaatttcttttacacagtccagtagaaaacaaatagataaccgcctgcctgaactttctcatcctcagagtgatggggttgatagtacaagtcatacagatgtgaaatctgaccctctgggtcacccaaattcagaggaaaccgtgaaagccaaaataccttctaggcagcaagaagagctgccaatttattcttctgattttgaagatttcccaaataagtcttggcaacagaccactttccaaaacaggccagatagtagactgggaaaaacagaattgagtttttcttcctcttgtgagataccacatgtggatggcttgcactcatcagaagagctcagaaacttaggttgggacttctctcaagaaaagccttctaccacgtatcagcaacctgacagtagctatggagcttgtggtggacacaagtatcagcaaaatgcagaacagtatggtgggacacgtgattactggcaaggcaatggttactgggatccaagatcaggtagacctcctggaactggggttgtgtatgatcgaactcaaggacaagtaccagattccctaacagatgatcgtgaagaagaggagaattgggatcaacaggatggatcccatttttcagaccagtccgataaatttcttctatcccttcagaaagacaaggggtcagtgcaagcacctgaaataagcagcaattccattaaggacactttagctgtgaatgaaaagaaagatttttc

SEQ ID NO: 4395 - DNA, 3485 bp, Homo sapiens
cattcagacattctttatgagtcacctgccacctgcaagccactttgaggaaaatggttggtcttctcttccatgctccaaaagcccctgagatggcccctctgcgttgctgcattatgaataaaatcatcatggtcaggcgacccaagcagagcacagctgactatggtatgaggaccagtggccctgtggaaagcggtctcagtgctgactcgctgcagcttctttgtagctatgcagcaatcaagaatagtgctgagctcttgatggtggggccccaaggtatgaggccagccacaggccaagacttgctgtgtaggccttgcctgtcacatgatccgccaggccctcttcatcctccccgtggcctctcaggatcttcttccctgctgatctctcccaggctccaggatgtgtccctgcagttggttcatcccaccccagaggagtctttctaaactgtggctcggaacttgtcagttgcttaggcaccacctcctcacacttccaaggccttcctttcccagcctcgttagccactgggctgctctttctcacacactcaggtatccgccatgccacctgcccttaaccctccttcactcagcatttgcttgatgctgggtcctgggtaagacaactctcaacctattgcaggatctggccagcagtctgcaatgcaacggtgctctctctttgttcccaggcagatcggcaggtcgagaaataatagacacacgcaagatagcaaaatctgggtccaggggggtcaccgccttctgctcccacggtgccaacaacgcactggatataccggcatttattattaagtttggtgagagggcaggggaaggttagtgagggatttagggtcatttgattatgaggtgagatggtcacatggggatgaagtaattctttaacataacatctgtatgcagaagtacagtatacagggataagaatttatgatatagtgtgtgcatcagtagtttctaacagagccttaaaacagaaacacagtctttccatgacctatgattagcaagatattaatcagcagtaacagttgcagcaaaagctggttacaaacaatccatagaaacaggatgtgaagctagacaaccggttagaccagaaattctcagaagggagtatgccttaaccctaaagaggcctagaagagccgtggcaagatgagggcgtttatagccctatcttatccatatggacaggtgctcctcatgcatccgtttataggctctccacaagggtcacattccattcccagagctatgaacatctgcttttctaggataggaatcttggtgatgtgaaacctccctgactgcacgtccattcataggctctctgcaggggaaagcacatcacgtgctgttggctcattctggcagtccaacctggcattgtctttacacaatcctgcatgcaattatgtatttacaataatcaggagcatttcatcttttattccatagcaatagtttcagggggtctccctacatcaacctctggttccctctggtgctgttttctgagcacactgtgaacttccttgctggtaagggtgcttgtgctgcctcccctatgggaatgcccttttcaacccagcagtcactcagcttgtcagggtccaggtcactccatgaggtcagctggcaaggcttattcccaggggctggcccagcacagctctccaccattggttgggtggatcctgaactcctatgaggttgggcatgttgatgagccatctcccctctggactaagaggcccatgaggatggcggagaccacagtgcaaatgtggccctcaatacatgttggatgaggcaagttctatgtcaccaggagctcagtggggtttagcatccttggacatggctccacattagaacagtgataacagaacaattattgtgagctcctattgagacaggaaaatagggtctagaaacagggaacttaaggccactctgtgctaacttcctaaaagagaaaacaccagggtctggaggcaggaaatctaaggccaattcactctgatttcccaaagctggatcaaaaggaaaataccggggtctgggggcaggaaacctaaggctgattaacacaaacttcctaaagctaaaccaaaagacaaaaaccccatctctccatgctgagtaacaaaggatcagaggctactctccctacaaccatccctcttccaccacatctcagatggaaagggaggggagggtgccttgttgaccatgggccaagcagggaccatcccttcatctgcatagggtgccagttcacctcagcctttaattagccacagaccaaatccttcatccagataaggggtagtcattaagaacctcaaatagggtacttaaagcccagaaaactttgtaactgggcccttgagccacttgctcagacccactctcaccttgcagagggctttctcactttaataaattcctgctttcactgctttgttcctgcatttcattcctctgctactttatgcattttgttcaattctttgttcaaaacgccaaagacctggacaactcgtagtcaatctgctgtgctaagtgctctgctagtctgtgtcatttactgtgcacacccatctcttgggtggatattaggaatgagcccgtttctccaatgagccaagctaggccatggaggggttgagccatggtgcagtttctgcagtgaagaagcaacagggccagaataggcccacatggtcagactctcagacttacaaccttactcaagtacaatgagtgttccaatgatctgagcagaagaagttgtctttgtaagcagaaaatggctgaagaaagcaaaaagagaaaacagagcagattagtcattgatgtggtttggctgttttgtccctctaaatctcatgttgaaatgtgaccttcagcgttggaggtgggtttagtgggaggtgtttgggtcatagaggtggatctctcataaatggtttggtgctgtccttgtggtaatgagtgagttctctgttaggtacaaaccaccccaaagagcttcttggtactgccaacactccccgcaaacctctccgcgctgcccacccttcccccaaaccttcttacatttccaagcccttatctaggcaccgcagtgaagccagcctgatagaagactttacctatcaggccttgctgcgataaagcaaaccccaattacaaaccatccggaccaaacggggaggttgtgggaagcataaacaaactttacctacaccctccagtaccgtaaacatcacaaggtgatatgtggcagaattaaccagcagacaaccccgggatgcagccataccaaaggactccctcaaactccctgccccaatgtaaaccccctattctgtaagcttggggctgctttccttgactgttaagggggcagccgacaggttaataaaggcttgcctg

SEQ ID NO: 4396 - DNA, 3675 bp, Homo sapiens
ctccacaactactgcggaagcctcacagactgccagcctacccagggatcccgggaggtccaagttcagaatcccactttgagatgtttcttgtactaaaacgcttggtttacaaaaagtcttcccctatttgtttagagaacccgaacgatgtcgtcactggcagcgaagcgccttggcatgaaccgtaggccagctggctcaggaggtggaggcggtgaggcggccacttggggccaccgcttctggcggccgcaggagcgacccacagacagaaatcagggtgaaatggcccacacgtgccgtggaaccatcaacctgtccaccgcgcacattgacacggaggactcttgtggtatcttgctgaccagtggggccaggagctaccacctcaaggccagctcagaggtggaccggcagcagtggatcaccgccctggagctggccaaggccaaggctgtccgcgtgatgaacactcattcagatgactctggggacgacgacgaggctaccaccccagccgacaagagcgagctgcaccacaccctgaagaatctttccctgaagttagatgacctcagcacgtgcaatgacctcatcgccaagcacggcgctgcactccagcgctccctgacagagctggacggcctcaagatcccatctgagagtggggagaagctgaaggtggtgaatgagcgggccaccctcttccgcatcacatccaatgctatgatcaacgcctgcagggacttcttggaactagcagagatacacagtcggaaatggcagcgggcactgcagtatgagcaggagcagcgcgtgcacttggaggaaaccattgagcagctggcgaagcagcacaacagcctcgagcgggccttccacagtgcccctggccggccggccaacccctccaagagcttcattgagggaagcctcttgactcccaaaggagaggacagtgaggaagatgaagataccgagtactttgatgccatggaagactccacatccttcatcaccgtgatcaccgaggccaaggaagacagcagaaaagctgaaggtagcaccgggacaagttccgtggactggagctcagcagacaatgtactagatggtgcctcgctcgtgcccaagggttcatccaaagtcaagaggcgagtccgcattcccaacaagcccaactacagccttaacctctggagcatcatgaagaactgcatcggccgggagctctccaggatccccatgccggtgaacttcaatgagcccctgtccatgctccagcggctgacagaggacctggagtaccaccacctgctggacaaggcagtgcactgcaccagctcagtggagcagatgtgcctggtggccgccttctctgtgtcctcctactccaccacagtgcaccgcatcgccaagcccttcaaccccatgctgggggagaccttcgagctggaccgcctcgacgacatgggcctgcgctccctctgtgagcaggtgagccaccaccccccctcagctgcgcactacgtgttctccaagcatggctggagcctctggcaggagatcaccatctccagcaagttccggggaaaatacatctccatcatgccgctaggtgccatccacttagaattccaggccagtgggaatcactacgtgtggaggaagagcacctcaactgttcacaacatcatcgtgggcaagctctggatcgaccagtcaggggacatcgagattgtgaaccataagaccaatgaccggtgccagctgaagttcctgccctacagctacttctccaaagaggcagcccggaaggtgacaggagtggtgagtgacagccagggcaaggcccattacgtgctgtccggctcgtgggatgaacaaatggagtgctccaaggtcatgcatagcagtcccagcagccccagctctgacgggaagcagaagacagtgtaccagaccctgtcagccaagctgctgtggaagaagtacccgctgccggagaacgcggagaacatgtactacttctcagagctggccctgaccctcaacgagcacgaggagggcgtagcgccaaccgacagccgcctgcggcccgaccagcggctgatggagaagggccgttgggacgaggccaataccgagaagcagcggctggaggagaagcagcgcctgtcgcggcgccggcggctggaggcctgcgggccgggcagcagctgcagctcggaggaagagaaggaggcggatgcctacacgccactgtggtttgagaagaggctggatccgctgaccggggagatggcctgtgtgtacaagggcggctactgggaggccaaggagaagcaagactggcatatgtgccccaacatcttctgagcgccacccttgcaacaaatacaggcgcctgcacagcctggcccacctgttcattaatgcactcaatttagtactgaatggtctttctcccagcccattcccagcccttcctatttcctttcctattttttttttctccccacactttcttgggactctcaccttggaaggaggaagggctgacctgggttctctccagcccccaggtgcgccgggtcacccgtgccccttcattatggacctgggccctaccggaacccctgccccagttaccacaactcaggccggctggcccgggccatgggctgcgcaaatcaccagcccccaacccagggaggaactggcccctcctagggagcctcttcgacttttttagaaaaatgatctccatttctttccagccatgatgtttagtaaatatttttagtaccgcacttagcagacagctttccaagtgtgctttcttgccacaaaagtgtcctggcaagagccccttatttttaagacatcaggaagccagaccgctttgagttgggagaattttgtagctcaacatatcaagtcctcgatggtatctgagctgcccacacccccacctgccaaggccccacagagcccaaaacagaagggggctgccccagcccagcagagcacagagtttctggagctcccatccacagatgcaggagggggtactgatggtaacccccatgtggatttgagggcagcagtccctggcctcaccctagccagcctgggtggctccctagccccaagaggccaggaagggctggaaggcagggcctgcaggtgctccccgccctgagacccaggccccaaatcagcaataatgaacaaacccttggcccagcctgggctggtgacctgggcaccagagaccttgcatccctcctcatcctaggaggcccctaggggtgccccatctcagtgtcccctgaactctttatttgcctaatttatatatatatatatgagatatataaatatatataaaatagctattttgcttaaatttctacagtatgtaaaagtgaaaaaatgatgaagacgggtgcacctgtctgagtttggccctcatgtgagctgtgcccttccctctcctcatgcccccttccagcggcttctgccaaccatggggggctggaccaccatggccactgacccagcccctcagaatcccacactccaatcctttccatttcagtttagtcctaaaagttcatcacagggtctttctttctactccaggactggttttgtttttatatatat

SEQ ID NO: 4397 - DNA, 4339 bp, Homo sapiens
ctggtttctgcccccgagaaattgcagaatgtagcttagtcagtcatgtctgttctgttttcttctcatgcagttcctaactcttgtcttctttcgtaatctaaaaaaacctgctgcccagctcccatgtcctctgcttctcttgtcttgtgttgctccacctggcacagctgcatgtccatgttcccccctcagtgcatcgcctcgttgctgcctctgcgtgtgcatgtgtttgggatggacgcacaaaaagccctcctcgtggtccttccagcaagctgggcttccctttactgcacagtgggcaagattcctgccttgtttcctgatgatacggcttctccagagtttggggggcctggaactcttaacttgggggtactgggttctatccagagaggttgacagcaggagggtttgcaacagcacttgtcttgcagacacagtgaagtgctcagtgtgaatctgagccaacagtagatggggtctctgggcagcagcatgggccccacaaggctcttaggcgtcagtgagtgcttttgtgtggagttaatgtgtgtggtttttttaacttgagaatagtagttcccaagcttactgcacattagaaacacctggaatccttcaactattctgaagccctggccaataccccagacgagctaaatcccagactgagtggccccaaccgtcagttatttgaaggtctcggggcatttccagcttctggtccaggctgagagcctgtcctccagaacccttgtgatccaggtgaagatcataactggcccccattctagacaatggagatttttgtttgggaagctaagcatcgtttttggtgatgggaatcacagataaggttatttagcgctttagcgctgtcctgcccagttatgtcattggcagaatgttgttggtctgtgtcctaaatgtgtttccttttgtgttcctaagtaaacagaatcaaagaccagtacaaggtgtccgtgcgcatccctcctgacagtgagaagagcaatttgatccgcatcgagggggacccacagggcgtgcagcaggccaagcgagagctgctggagcttgcatctcgcatggaaaatgagcgtaccaaggatctaatcattgagcaaagatttcatcgcacaatcattgggcagaagggtgaacggatccgtgaaattcgtgacaaattcccagaggtcatcattaactttccagacccagcacaaaaaagtgacattgtccagctcagaggacctaagaatgaggtggaaaaatgcacaaaatacatgcagaagatggtggcagatctggtggaaaatagctattcaatttctgttccgatcttcaaacagtttcacaagaatatcattgggaaaggaggcgcaaacattaaaaagattcgtgaagaaagcaacaccaaaatcgaccttccagcagagaatagcaattcagagaccattatcatcacaggcaagcgagccaactgcgaagctgcccggagcaggattctgtctattcagaaagacctggccaacatagccgaggtagaggtctccatccctgccaagctgcacaactccctcattggcaccaagggccgtctgatccgctccatcatggaggagtgcggcggggtccacattcactttcccgtggaaggttcaggaagcgacaccgttgttatcaggggcccttcctcggatgtggagaaggccaagaagcagctcctgcatctggcggaggagaagcaaaccaagagtttcactgttgacatccgcgccaagccagaataccacaaattcctcatcggcaaggggggcggcaaaattcgcaaggtgcgcgacagcactggagcacgtgtcatcttccctgcggctgaggacaaggaccaggacctgatcaccatcattggaaaggaggacgccgtccgagaggcacagaaggagctggaggccttgatccaaaacctggataatgtggtggaagactccatgctggtggaccccaagcaccaccgccacttcgtcatccgcagaggccaggtcttgcgggagattgctgaagagtatggtggggtgatggtcagcttcccacgctctggcacacagagcgacaaagtcaccctcaagggcgccaaggactgtgtggaggcagccaagaaacgcattcaggagatcattgaggacctggaagctcaggtgacattagaatgtgctataccccagaaattccatcgatctgtcatgggccccaaaggttccagaatccagcagattactcgggatttcagtgttcaaattaaattcccagacagagaggagaacgcagttcacagtacagagccagttgtccaggagaatggggacgaagctggggaggggagagaggctaaagattgtgaccccggctctccaaggaggtgtgacatcatcatcatctctggccggaaagaaaagtgtgaggctgccaaggaagctctggaggcattggttcctgtcaccattgaagtagaggtgccctttaaccttcaccgttacgttattgggcagaaaggaagtgggatccgcaagatgatggatgagtttgaggtagacccctttcccgggaggccatgtcacaggagtggcctgtcgcatcctctcccgagtgccagtgtcctttctcaacttcctgttgactctgcctcctcctgctcggactgggcactgacttcccttcacggcgggtggccttccctctcaccacttctgggtcccagggccaatggactctttcctgttctctggggtcctgaacgtcaagtcagccccctcttcacgtaggtgaacatacatgtcccggcacctgagctgcagtctgacatcatcgccatcacgggcctcgctgcaaatttggaccgggccaaggctggactgctggagcgtgtgaaggagctacaggccgagcaggaggaccgggctttaaggagttttaagctgagtgtcactgtagaccccaaataccatcccaagattatcgggagaaagggggcagtaattacccaaatccggttggagcatgacgtgaacatccagtttcctgataaggacgatgggaaccagccccaggaccaaattaccatcacagggtacgaaaagaacacagaagctgccagggatgctatactgagaattgtgggtgaacttgagcagatggtttctgaggacgtcccgctggaccaccgcgttcacgcccgcatcattggtgcccgcggcaaagccattcgcaaaatcatggacgaattcaaggtggacattcgcttcccacagagcggagccccagaccccaactgcgtcactgtgacggggctcccagagaatgtggaggaagccatcgaccacatcctcaatctggaggaggaatacgtgagtctctgtgggccttggagccctgaggcaccctggcacgtccaccggcctgaggcccagccaggagcttcaggggacaaggtggcacttgtgtttccagaggcaggcgaggtgcaggggtgagcaggcgggcgggatgctgggggtgctgggcagactgaccctgtcttcctgtcttctgcctgcagctagctgacgtggtggacagtgaggcgctgcaggtatacatgaaacccccagcacacgaagaggccaaggcaccttccagaggctttgtggtgcgggacgcaccctggaccgccagcagcagtgagaaggtcagatgcgggcttctgccctcctgggtcccagggagggtgggcgggcaggcgggcttggtgtcctgagggtggcaactgcgtcggaagctgcttgcgagttggggagcatcccctcctgaagccgtgtcctctctctgcacaggctcctgacatgagcagctctgaggaatttcccagctttggggctcaggtggctcccaagaccctcccttggggccccaaacgataatgatcaaaaagaacagaaccctctccagcctgctgacccaaacccaaccacacaatggtttgtctcaatctgacccagcggctggaccctccgtaaattgttgacgctcttcccccttcccgaggtcccgcagggagcctagcgcctggctgtgtgtgcggccgctcctccaggcctggccgtgcccgctcaggacctgctccactgtttaacactaaaccaaggtcatgagcattcgtgctaagataacagactccagctcctggtccacccggcatgtcagtcagcactctggccttcatcacgagagctccgcagccgtggctaggattccacttcctgtgtcatgacctcaggaaataaccgtccttgacttt

SEQ ID NO: 4398 - DNA, 3958 bp, Homo sapiens
ttgtgtcttaacaattcattctgccttcttccttgaaagttctctctcctttcataaaaagaagacgtgagctgtggaggactggcttggctgcctgcagaagattgttctcacttgctgtttaggttgctgagacttccaggcctgggtagacagcaggatttgctctgttgtcatcgtccttgccttgcaggctgaagtgagcaatgactacacttcatggtggccgatcttataaatgtgcagataacgtctggccaggcccaaagtgcccttttcccaccatcccctcagctgtggttgatgagttccccttttctcccttggccacgtcatggggaaagttccataggaaaagcaaaggtaagctccagaaagactgaaggctgtgcatctccccttgagccacttccatcctggcctggtctcttacctgtctctgtaaaaaaaaaaaaaaaaaaaaaaaaatcagatatgcagttattgagcacctgctgtatgtccagcatggtgagggatgcagagaagtataaggcggtctctggaggccaagtagagtatcagttacatcacctgaaaacttgaagtgaccctgagccatgggtgccccactgaacacagagaagcccagagagtgctatgagaattttctggagaagggtaatcagtgaaggctggtgagtccctagacagcttcacaaagagctgggaccccagctggatcttaaaggatggtttcgtggagaaggaatgtgagtcaaaagtacagagggcaacaagcccagccagcctgctgatttgtatggggagaagaaagcaattccgtgtgcagggtgggatgggtcttgtggctgtactgaaaagtccgggcagaggactcgatacttcagtgacctctcccagcctctgccagagggcaaggagcagtagggagtactcattcattgcatctctataaaaagacccagagagatagaataaggatcaaaagcacacactagagagaggctgcctgcattcagatccctgtcccaccatgtagcagtgaaacctcgggtgagtagcccagcctacctggcttcagtctcttgctctgcaaggtggacatcaccatagcctcgaaggttgttaggaaagatcagtgagatatgcagtcagcgctcagccaaaaaggtgccagacacacactacttgttcattacatgtcagtcacaggatagaggcaaatggtgactaaaacgatagaaggttacccagggctacgaggaagcggtcactactcagagggagctctgagggctcctctgcatatagacacatcatgcccttgcaaaccacgacttagaaggtttaatgacccttttctcttcaccattcattagcagacttattccaagccacgtggcatgcagtatgtttagtctccccacccctctccctcttgtctgcagcatgaggctccagctttagctgtaccctacagaaaaaagtcccagaagttccttgagctgaggcagacaggaggtggtgactgctgtacatttgccttttgagctccacagggtatgcaaatgagaaggtgctagaagccgtccccgctcaaaggatcttgataagttgcccactccttcatttgagaagagtgcgtacgagagtgaaaatggccctcgtttcccccagagagttttcacaaatgttttggcctggcattctccaaatacatcaactggaaccctgaggtgatatgcgggtgttaattggtgcaatctttcactgtcctctgtctacctgaaatgtaattcttttaccgctgtggacttgctccatggagaaatgctcctttgattctgtcatcaagaacctcaaagaaaccatgtggccactgtgttacaggtagaaagaccctgcttaagtgaaggtatttttgttttattataaaatcatgcccaagattaatacacctttttgccaggatcccaaatacgcagccctttgtcatgaagaactggcagccacattccttcagggtgaaatttgtattcacagccatacatgtatagtttttgaagcgctggccccccgtacaggagaagaaagaagggactcttggctcatccatgaccttgtaggtcaataccatattaaagttcctgtcaggcacgcagtagtcacccagcaagtatcagctgattaaagggagaagagtcgagcacctggctgactgagccttacgttacacttaatctgaacgggccaccgatgctgtatttcaaaccttgatgtttgcatgtccatccttactacaggtggctttcaggttggccgtgaagggacaagccagccagtcctgagtttagagcgattggccctatcattctcaaggacccactggaatagtatcagggaatatcattttgggtaatggccaagcaaagccttagtattgctatcatatattgtgaggggccttcagaatgcaatatgacctcttttaaaaatgcaaactatagtccttgccttatctgtgtttatctcaaaatgttgaaatgtgcctctaataggaactgcaggattcagtccccccccaccaccccccacccaacactcacatcattacacatgagcatccctgaactgagacctgaaagcaagaatcttctctgttttcaggtgttccaaacctcagcttccagcctcttcagtacacaggaaactttgtttcatttttatgtttttatttatttttttcattcccaaaaaacataaaatgtctactgcccctggtggtcagtgctgggaaatacaactcgagccttgcctattgaaatgcagaatgtattccaacaaggaacctgacattgtctactgctttttctctcacacacatgcacacctacctgcgcctcccattttactccctcctaatccttcgaagtgttgatctggggaaagtgagaaccactactgaggggcaaatcaaccggttctctgggccggggacttcagctgccctccagacgtgcacaggctcacagtcatatttcagacgtgaccgcctcaaatcttccttaagtgctatcttctcaggttaattaatcaccaggcttaaacttgctgttaccagcaggaagtccatcctgaagtcagcaatgttacgattgcatcttctaatactgtttatcctgcattagtgtttacttagggggaaaattgatccgtaattgatatttcagtcttccagagctggtgttggaagagcctaatgcaggcctttaatagcaagcaaatatttaaatcccttaatggttgctgaatattgaaatgtgtgactttattactctttttggtttgttttctctgtagttgtgtatttcatcgtttaaacctgcaatggatgctggcaagtgcaagtctagctaatccacaaaagctgtttgcccagacacagcagacctgattaaaaagtattgctatggaagggaatcttctgcactaatcagtctctgttagctagtgacgaaattactatccatctctctctctttctctttctctccctctctctaggcctgttttctctaacctcctctcccagaataaagtgatgagggcagctatagtgttgcaattaggaacatgaatcttttatcgtttggacaaggaagggaaaatgccattactgtcaactgaaatgtcctacttgggttttttgctcctacttccctgccaaagcccattgctgctgctgaaattgtataacattcacagctgttcttgatggcttgattcttaacacagccagaaatgtagcccgggagatgcttaagacagtttatggaaaataatagatttccttgcagagacaccaatgcatcgagaagggccttgagtcacgttagccccagccaagatcaccaattttctctctatctggcttcagttacaaaggctatgcctt

SEQ ID NO: 4399 - DNA, 1308 bp, Homo sapiens
cgaaaacggcggccgacacttcaggttgatgcgatggggactggtgccgtcctgggtgaaagaaccgaagaaattcacgctgctgatcaatgcacgttccgagacggttcgggacaaaccggcgttcaagaacgcgatgaaacggcgccgggtgctggttccatccgatggctattacgaatggcaggacaaggacggccgcaagcgcccgttcttcatccatcgccgcgatggccagccgacaggttttgctgcgctggcggagacctggatgggcccgaacggcgaggagttcgacagcgtcgccatcgtcaccacgcaggccagcccggatctcgcagagttgcatcaccgggtgccggtgacgatcgcgcccgatgatttcgagcgttggctcgatgggcgcgcgaacgatgtcgaagacgtcatgccgctgttgagggcgcctcgcgtcggcgagttcgcctggcacgaggtttcgacgcgggtcaatcgtgttgccaatgacgacgaacagctggtgctgccgatcagcgaggagcagcgcgcggccgaagcgccgaagccggtgaagaaagccgcgccgcgcaagaccacgccggaaccggaggacgaagggcagggatcgctgttttgaggaacgggatggatcagcacgaaaacaatctggatcatatcgccggcgaggccttggccgcgctgacgcagacgaaacagctttcgccgttctcgtcgcgcgcagaagggctgtcggtcgatgacgcctatcgcgtgaccgcgcgcatgcggcagatgcgcgaagtccaaggctggaaggttgccggccgcaagatcggcttcaccaaccgcaccatctgggaacaatacaaggtctatgcgccgatctggagttatatctatgaccgcaccgtgcacgacctcgcgaccacgccgacgttgtcgcttcgtccgttttcagagccgttgatcgaacccgaaatcatgttcggactgaagatcgctcctgcggttggcatggacgaggctgcattgtccgcctgcatcgattgggtcgcgttcggctacgagattgtgcagtcgatctatcccggctggaaattcgctccactattagtggttaaagtactgaataatgtctgggtctatttccatctgtaaactaagaatatttgtctcacgtgtctgtcatgaatagcaaatgagaaaatgtatataaaagcactttgtaaattgtaaaagtagtacagatgtgagcttctatttgtttagaagcataaatgtgaattatatacagtttgaattttgcat

SEQ ID NO: 4400 - DNA, 2722 bp, Homo sapiens
atcgttccaagtccgccgccgtcccgggtggcctttcctccctgcctggctccgcgcgctccagccctgcgggaggcggcggcgagaagctgcggctctgggtgcggtgcggggcgcccgggcgacaggcgggcgcaaggcgggcgcgcagcagaccggttggcgccgcactatgctccccagcgcggtcgcagcccacgccggtgcgtactgggacgttgtggcttcctccgcgctcctcaacctccccgctgcgcccggctttggcaacctgggcaagagtttcctgatcgagaatttgctgcgggtcgggggcgccccaacgcccaggctgcagccgcccgcgccccacgacccggcgaccgccctggccaccgcgggcgcgcagctccggcccctgcctgctagcccagttcccctaaagctgtgccccgcagccgaacaagttagccccgccggggcgccctacggaacgcggtgggcttttcaagtgctcagtccctctgcggacagtgcgaggctgccgggccgggctccgggggaccgagactgtaccttccagccttcagcgccagcaccttccaaacctttccttctgagcaccccgccattctactcggcgtgctgcggtgggtcctgtcggcgccctgcatcctccactgcttttccaagagaagagagcgtgctgcctctcctgacacaggactctaattccaaagctcggaggggcattttaagaagagctgtcttttctgaggaccagagaaaggctctggagaaaatgtttcagaaacagaaatatatcagcaaaacagaccgaaagaaacttgccatcaacttgggactaaaggaatcacaggtgaaaatttggtttcagaacaggaggatgaaatggcggaattccaaagaaaaggaagtgctttccaacaggtgtatccaagaagtaggtcttcaagaggatcccctctcacggtctgctctgggtttcccttctccatgtccttcaatatgggacgtcccccaacagcactcaagtccaagatggagggagaattctccagaaccttcagaaagactaatccaggagagttcaggggcaccacccccagaagcaaattcactgcaaggtgccttatatttatgttctgaagaagaagctggaagcaagggtgtacttactggggccgtctgaatggaagcattcctccgtgttcatttaaaagaacgcttaatagtaacatctggactctaatgccagctagcttgtacctcatcagtgcttagagcctaacaactttggagcgatgtatgaactaatgctttaggaaacccactctagtgttctcttgtttggccctagactcaggcttaatttgtaagtggaatagaatctcccagcaagtatgacagaactgaaaagaaggagagcaacagctggctcggtccctgctctgagtatgtgtatatatgtgtttgtctctatgtgtgtgtatatacataaatatccattaaaatgtattagtagaaactagtttctctttaactattgcattgagtaaattcacttccctttatgtgaagaaaactaccattgacagaatgttattaactttttgaaaataatgtaaaatttggactttagtgcaaactttcataccccaaaaacatgtttttaaaaattctctattttctgacttcttttggtatccagctgtaagtgaattttaacaccttagctcagcagtcctcaacaaatgagccactgctagatacatacactgagaatatatatttaaaatgaacctaacaagcaaattagaagaatttctgtatataactattagtatccttaatctccaagtctctggaccatcgggccatcatgagggagagacccatttaactaataattattttttgatctcttctctgtaaagatgggcctagaccagggtttgcaaaataaaatgcctttaagagcctgtcaggtaaatagagggtatggcccacccagagatatttgagtcaagtaatttttcaaatactgtattggccaaacaaaatgtctatgccaagaagtttgtgacctctggctaagactaaagaaagccgtggtgtcacagttcttaaaatttttctaactggacttaaaaccacaatactaacagaatcaatgatgatttctgtttgcgcttctagttagggactcaattttccacttaggtggcatacactttatatatcaggttatttttatgtattaacaaacaccacacagatgttttgtgttttttgactaccctgaaattgtatctttctaaaattgcatttctggtaacgatttgccgagttaatccagaagtttttactccaggaccaagaagaaattatgtttcactttgaaggaaatgcaacaaaaataggaaatgatgtggttttgcattaaactcttatcaatctgtggacaagaaacactatcagaagttcattaagtggcattttgttagtgagtaagctgcataatgatggtggcttctaatttgctgaactccgctagagtctgagaagttaacgtcttttgagggtttagtgtttagaaaagatatttcaggagataacggttttaatcaacagcaggaaattattttgtacgagtagaattggacttggtatgtcaacctgtgtctttaccacatgatcttttacttaaaagtcattttag

SEQ ID NO: 4401 - DNA, 2012 bp, Homo sapiens
gttgcccatgtaaagtcaatccgcacttccaaccccagtccctgccaacacagcacaggttgctgcctttggaatgaacagcccatttggggagatggcatcaaccagacccctatgccttgttccgagcacgaagaaacagcagcagggatgtctaccagccacctctcaccgctgccattgagaagatgaaaaccacccacctcaaggaacagaaagcatttgccctcatcagagaaatcctggcatacttgggcttcctgtggatgctactgctcgtggcctacgggcagagggaccccagcgcctaccacctcaacagacacctccagcacagcttcaccaggggcttttcaggtgtgctcggcttccgagagttcttcaagtgggccaacaccaccctcgtgagtaacctgtatggtcaccccccaggctttatcactgatgggaactccaagctggttggcagtgcccagattcgtcaagtgagggtccaggaaagctcttgccctcttgcccagcagccgcaggcatatctcaacggatgccgtgcaccatattccctggatgctgaagacatggcagactatggggaaggctggaatgccaccaccctcagtaatggcagtaccagagccaggaccaacgtcaagggtatcccatctggggcaaactcactgtgtaccggggaggaggctacgtggtccccttggggactgatcgccaaagcacgtcaagaattctccgctatctctttgacaacacctggctggacgccctgaccagagctgtgtttgtggagttcactgtctacaacgccaacgtcaacctgttctgcattgtcacgctgacgctagagaccagcgctctgggcaccttttttacgcacgcggccctgcagagcctccgcctgtaccccttcaccgacggctggcaccccttcgtggtagcggcagagctcatctacttcctcttcctcctctactacatggtggtgcagggcaagcgcatgaggaaagagacgtggggctatttctgcagcaagtggaaccttctggagctggccatcatcctggccagctggagcgccctggcggtgtttgtgaagagggctgtcctggccgaaagggacctccagcgctgccggaaccacagggaggaaggcatcagcttcagtgagacagcagcagccgatgccgcccttggctacatcattgtcttcctggtactcctgtccacagtgaagctttggcatctgctcaggttgaatcccaaaatgaacatgatcacggcagccctacgccgtgcctggggcgacatttcaggctttatcattgtcatccttaccatgctcctggcttactccatcgcgtcaaacttgatatttggttggaaactccgttcctacaaaaccctctttgatgcggcggagacgatggtcagccttcagctgggaatcttcaactacgaggaggtcctggactatagcccagtgcttggctccttcctcattggatcctgcattgtttttatgacatttgtggtgctgaacctgtttatctctgtcatcctggtggccttcagtgaggagcaaaaatactatcagctgtcggaggaaggggagatcgtagatttgctgctgatgaaaatactcagtttcctgggcattaagtctaagagagaggagcctggaagcagcagggagcagcctgggtctctgtcccagactcgccactctcgaccagcacaagctttgcccaaggactaagctgttcgtccacacgccaccatctaccagtggggacgcccagggcctcgggcgtacgcttaccagcgactctatagtctctctaggtcatagctttcatgtccattgaagaattaccaagcccagcaagtaaaaaaaattacaataacagagatatatgtaaaattgccaatactatgagagcttctttgttcaaatgtatttcctcttattataaataaaacaaatattacatggagtttgg

SEQ ID NO: 4402 - DNA, 2542 bp, Homo sapiens
gcgcacaaacccggaagcggatcgcgtggagtgaaggtcctaccacggcgcgtgagtttcgctctgccttggattaagtctgcacttcccaggtccccggcgcttctgcccctgggacgtgggatccccacggacctggaaattctcgcctgtcttcccttcacccagagcaaattgagacgtcccggattgattcctaaagactcatgttatgtgaagaagcagctcagaagaggaaaggaaaggagccaggcatggctcttcctcagatatctcttccaaacgcatgatgaaggaggtcttgtcaacagggcaaggcaatacagaagtgatccacacagggacattgcaaagatatcaaagttatcacattggagatttttgcttccaggaaattgagaaagaaattcatgatattgagtttcagtgtcaagaagatgaaagaaatggccatgaagcacccatgacaaaaataaaaaagttgactggtagcacagaccaacatgatcacaggcatgctggaaacaagcctattaaagatcagcttggatcaagcttttattcacatctgcctgaactccacataattcagatcaaaggtaaaattggtaatcaatttgagaagtctaccagtgatgctccctcggtttcaacatcccaaagaatttctcctaggccccaaatccatatttctaataactatgggaataattccccgaattcttcactactcccacaaaaacaggaagtatacatgagagaaaaatctttccaatgtaatgagagtggcaaagcctttaattgtagctcactcttaaggaaacaccagataccccatttaggagacaaacaatataaatgtgatgtatgtggcaagctctttaatcacaagcaataccttacatgccatcgtagatgtcacactggagagaaaccttacaagtgtaatgagtgtggaaagtccttcagtcaggtatcatcccttacatgccatcgtagacttcacactgcagtaaaatctcacaagtgtaatgagtgtggcaagatctttggtcaaaattcagcccttgtaattcataaggcaattcatactggagaaaaaccttacaagtgtaatgaatgtgacaaagcttttaatcagcaatcaaaccttgcacgtcatcgtagaattcatactggagagaaaccttacaaatgtgaagaatgtgacaaagttttcagtcggaaatcaacccttgagtcacataagagaattcatactggagagaaaccatacaaatgtaaggtttgtgacacagctttcacatggaattctcagctggcaagacataaaagaattcacactggagagaaaacttacaagtgtaatgagtgtggcaagaccttcagtcacaagtcatcccttgtatgccatcatagacttcatggtggagagaaatcttacaaatgtaaggtctgtgacaaggcttttgcgtggaattcacacctggtaagacatactagaattcatagtggaggaaaaccttacaagtgtaatgaatgtgggaagacctttggtcaaaattcagatcttctaattcataagtcaattcatactggagagcaaccttacaaatatgaagaatgtgaaaaggttttcagttgtggatcaacccttgagacacataagataattcacactggagagaaaccatacaaatgtaaggtttgtgacaaggcttttgcgtgtcattcctatctggcaaaacatactagaattcatagtggagagaaaccttacaagtgtaatgagtgcagcaagaccttccatctgaggtcataccttgcaagccatcgcagagttcatagtggtgagaaaccttacaagtgtaatgagtgcagcaagaccttcagtcagaggtcataccttcattgccatcgtagacttcatagtggtgagaaaccttacaagtgtaatgagtgtggcaagaccttcagccacaagccatcccttgttcaccatcgtagacttcatactggagagaaatcttacaaatgtacggtttgtgacaaggctttcgtgcgtaattcatacctggcaagacataccagaattcacactgcagagaaaccttacaagtgtaatgaatgtgggaaggcttttaatcaacaatcacaactttcacttcatcatagaattcatgctggggagaaactttacaaatgtgaaacatgtgacaaagttttcagtcgcaaatcacaccttaaaagacataggagaattcatcctggaaagaaaccatacaaatgtaaggtttgtgacaagacttttgggagtgattcacacctgaaacaacatactggacttcacactggagagaaaccttacaagtgtaatgagtgtggcaaagcctttagcaagcagtcaacacttattcaccatcaggcagttcatggtgtagggaaacttgactaatgtaatgattgtcacaaagtcttcagtaatgctacaaccattgcaaatcattggagaatctataatgaataaagatctaacaagtgt

SEQ ID NO: 4403 - DNA, 2102 bp, Homo sapiens
aagctttccccggtgtcggcggcaggtggaatttccacgctttatctgcgcctgcgccgcgcgggattcgcggtccgagctgaagaggttcgcggtccggtttcacttctccgaaccctgaggcagtgtgtgaagctgggacgccagccatgttccagaccgcttggcgccaggaaccagtgacctttgaggatgtggctgtgtacttcacccagaatgaatgggccagcctggactctgtgcagagggccctgtacagggaagtgatgctggagaattatgcaaatgtggcttccctggcattcccattcaccacgcctgttctggtctcccagctggagcaaggggaactgccatggggcctcgatccctgggaacctatgggcagggaggctctcagaggtatctgtccaggggatgaggccagaactgagaaggaaggattaactccaaaggatcatgtgtccaaagaaacagagtccttcagactgatggtggggggcctgccagggaatgtttcccagcaccttgactttgggagcagcctagagcagccacaaggtcattggataattaagacaaagtcaaagaggagacatttcacagatacctcagccaggcaccatgaggcctatgaggtcaagaatggagagaagtttgagaaattaggaaaaaatattagcgtcagcacacaactcactacaaatcagacaaatcctagtggtcagatatcttatgaatgtggacaatgtggcagatatttcattcaaatggcagacttccaccgacatgagaaatgtcacactggtgaaaagtcttttgaatgcaaagaatgtggaaaatacttcagatataactcattacttattcggcatcagataattcacactggaaagaaaccatttaaatgtaaagaatgtggaaaaggtttaagttcagacacagccttgattcagcatcagagaatccacactggagaaaagccctatgaatgtaaggagtgcggcaaggccttcagtagcagctctgtcttcctccagcaccagaggttccacactggggagaagctctatgaatgtaacgaatgttggaaaactttcagttgcagctcaagtttcactgtccatcagcgaatgcacactggggagaaaccttatgaatgtaaagagtgtggaaaacgattaagctccaacacagccttgactcagcatcagcgaattcacactggggagaagccctttgaatgtaaggagtgtgggaaggcattcaatcagaaaataaccctgattcagcaccagcgagttcacactggcgagaaaccttatgagtgtaaagtgtgtggtaaaaccttcagctggtgtggaagattcattctgcatcagaaactacacactcagaagacacctgtccaagcatagggctatccatagttaggcccactgtgcctctccttttttctctttattttcatgctttttatcagtgtcctcgctgtccttcctggttagacacttggctttcatcatgaactcttctttaagttttttgaacctgtttccccaacatgaagtctctttatggttagagaagaccaaaaaacaaacaaacaaacttagaaacaaaaaggaaatgtaagtttccagatttaaaggacatgctgggtgcccagcaggatggattcaagggaaacctacattaaggaaaattgctgtgaattatgaaaacaccaagtttgaataagaggatcatggagaaaaaatgagaccctaaaaagtttctagagagagaaaacaaaagatcagaaatgaaagcggggccaggcgcggtggctcgtgcctgtaatcccagcactttgggaggctgaggcgggtggatcatgaggtcaggagttcgagaccagcccgcccaatatggtgaaaccccgtctctcctgaaaaaaaaaaaacacaaaaattagccaggcatggtggcgcatgcctgtaatcccagctactagagaggctgaggcaggagaatcacttgaatccctgaggcagaggttgcagtgagctgagatcgcaccactgcactccagcctgggcgacagagtgagactttgtctc

SEQ ID NO: 4404 - DNA, 2142 bp, Homo sapiens
tattgggcagtacaggtctagatgatcaaatgcctacactgaatgacttcatagaatatcactgttgagctgacaccgatctaaaagattcacatgtcggagcaagactgttagtggagtaaactcctcgagtgtacaggacccctttgttcttgttctattttgtttttaacagcttgctctgctccataaagatccatcagtcaccctcaaactcttcggaccttctgcctgttcattcctatgaagctgcgtttgctaaggtactcggtgacctggagcaaacattctaaaacagcgcaaatggcagaagcagagcctacaggcttcttgtcgggaatccgttcggagtatggaaagaatcccagtgtctgtggacttctgggttgtctgctgtgcagttctgaaatgtaaccctgggattcctaaaagaatgtcaactctgtgctttggattttctgatgaatttcacccattcatcgaggcacttcttccacatgtccgtgcaattgcctatacttggttcaacctgcaggctggaaaacgcaagtactttaaaaagcatgagaagcgaatgtcaaaggatgaagaaagagcagtcaaagatgagcttctcagtgaaaagcctgaaatcaaacagaagtgggcatccaggctccttgccaaactgcgcaaagatattcgccaggagtatcgagaggactttgtgctcaccgtgactggcaagaagcacccgtgctgtgtcttatccaatcccgaccagaagggtaagattaggagaatcgactgcctgcgacaggcagacaaagtctggcgtctggatctagtcatggtgatcctgttcaaaggcatccccttggaaagtaccgatggagagcggctcatgaaatccccacattgcacaaacccagcactttgtgtccagccacatcatatcacagtatcagttaaggagcttgatttgtttttggcatactacgtgcaggagcaagattctggacaatcaggaagtccaagccacagtgatcctgccaagaatcctccaggttaccttgaggatagttttgtaaaatctggagtcttcaatgtatcagaacttgtaagagtatccagaacgcccataacccagggaactggagtcaacttcccaattggagaaatcccaagccaaccatactatcatgacatgaactcgggggtcaatcttcagaggtctctgtcttctccaccaagcagcaaaagacccaaaactatatccatagatgaaaatatggaaccaagtcctacaggagacttttacccctctccaagttcaccagctgctggaagtcgaacatggcacgaaagagatcaagatatgtcttctccgactactatgaagaagcctgaaaagccattgttcagctctgcatctccacaggattcttccccaagactgagcactttcccccagcaccaccatcccggaatacctggagttgcacacagtgtcatctcaactcgaactccacctccaccttcaccgttgccatttccaacacaagctatccttcctccagccccatcgagctacttttctcatccaacaatcagatatcctccccacctgaatcctcaggatactctgaagaactatgtaccttcttatgacccatccagtccacaaaccagccagtcctggtacctgggctagcttggttcctttccaagtgtcaaataggacacccatcttaccggccagtgtccaaaattacggtttgaacataattggagaacctttccttcaagcagaaacaagcaactgagggaaaaagaaacacaacaatagtttaagaaattttttttttaaataaaaaaaaaggaaaagaggaagactggacaaaacaacacaaaggcagaaaggaaagaaactgaagaaagaagataatagaccagcaattgcagcacttacaatcactaattcccttaaggttgaaactgtaatgacataaaaagggtcgatgatatttcactgatggtagatcgcagcccctgcaacgtagcctttgttacatgaagtccgctgggaaatagatgttctgtctctatgacaatatattttaactgactttctagatgccttaatatttgcatgataagcta

SEQ ID NO: 4405 - DNA, 2232 bp, Homo sapiens
agaacccctcagggcctcagctgaagctcagacagagtgcctgcgtgtgcacacacacacacacacacacacacaacctaattttcaacacacttgcacaaatatagaaacatcatggggaaaaatgcaaaatacctatgatttctggaacaagatccaagatgacaaagatattccctgcttattctgctcatgcccgggctcccctgcccacccccagtgcgttcatgtgatatcatgaaaaagcagcaggggtggcatgaacttgcacaccaggctgcccaggcttgagacccagctctgccacctagaagcttggagcccctgaacaagctgcaattctgtgcctgggcttttctgactgcaaaatgaggataatcacagcccctgcctccaaagtgtcccgaggatcaaatgagttgatgatacttgcacggcgctcggatcgtggctcaccaacttctcctgcccactccctatcaaggaaaagtcccataatgtatccatcaaccaccatggctaatgcacccggtctggtgagctgtaccttctttctggcagtgaatggtctgtattcctctagtgatgatgtgatcgaattaactccatcaaatttcaaccgagaagttattcagagtgatagtttgtggcttgtagaattctatgctccatggtgtggtcactgtcaaagattaacaccagaatggaagaaagcagcaactgcattaaaagatgttgtcaaagttggtgcagttgatgcagataagcatcattccctaggaggtcagtatggtgttcagggatttcctaccattaagatttttggatccaacaaaaacagaccagaagattaccaaggtggcagaactggtgaagccattgtagatgctgcgctgagtgctctgcgccagctcgtgaaggatcgcctcgggggacgaagcggaggatacagttctggaaaacaaggcagaagtgatagttcaagtaagaaggatgtgattgagctgacagacgacagctttgataagaatgttctggacagtgaagatgtttggatggttgagttctatgctccttggtgtggacactgcaaaaacctagagccagagtgggctgccgcagcttcagaagtaaaagagcagacgaaaggaagagtgaaactggcagctgtggatgctacagtcaatcaggttctggcctcccgatacgggattagaggatttcctacaatcaagatatttcagaaaggcgagtctcctgtggattatgacggtgggcggacaagatccgacatcgtgtcccgggcccttgatttgttttctgataacgccccacctcctgagctgcttgagattatcaacgaggacattgccaagaggacgtgtgaggagcaccagctctgtgttgtggctgtgctgccccatatccttgatactggagctgcaggcagaaattcttatctggaagttcttctgaagttggcagacaaatacaaaaagaaaatgtgggggtggctgtggacagaagctggagcccagtctgaacttgagaccgcgttggggattggagggtttgggtaccccgccatggccgccatcaatgcacgcaagatgaaatttgctctgctaaaaggctccttcagtgagcaaggcatcaacgagtttctcagggagctctcttttgggcgtggctccacggcacctgtaggaggcggggctttccctaccatcgttgagagagagccttgggacggcagggatggcgagcttcccgtggaggatgacattgacctcagtgatgtggagcttgatgacttagggaaagatgagttgtgagagccacaacagaggcttcagaccattttcttttcttgggagccagtggatttttccagcagtgaagggacattctctacactcagatgactctaccagtggccttttaaccaagaagtagtacttgattggtcatttgaaaacactgcaacagtgaacttttgcatctcaagaaaacattgaaaaattctatgaattgttgtagccggtgaattgagtcgtattctgtcacataatattttgaagaaaacttggctgtcgaaacatttttctctctgactgctgcttgaatgttcttggaggctgtttcttatgtatgggttttttttaatgtgatcccttcatttgaatattaatggctttttccattaaagaataaaatattttggacaatgcc

SEQ ID NO: 4406 - DNA, 2007 bp, Homo sapiens
tagtcgctgtgtcatggataatgatgacatttgaagctccaatttcttttttcagagggtgtgttgaagaggaagaaagaagattttattctgaaggaggaaattattgaggaagcacaggacctcatggtcctatcaagtggaccccagtggtgtggatcccaggaattatggtttgggaaaacctgtgaagagaaaagcaggttagggagatggcctggttacctcaatgggggacgtatggaaagttctacaaatgatattatagaagtgattgtcaaggatgagatgatctcagtagaagagagttcagggaatactgatgtcaataacctccttggtatacatcacaaaattctaaatgagcaaatattctatatatgtgaggaatgcggcaagtgttttgatcaaaatgaggactttgatcaacaccagaaaactcataatggagagaaggtctatggatgtaaggaatgtgggaaggctttcagttttcgatcacattgcatcgcacatcagagaattcacagtggggtgaaaccctatgaatgtcaagaatgtgctaaggcctttgtttggaagtcaaacctgattcgtcaccagagaatacatactggagagaaaccctttgaatgtaaggaatgtgggaagggctttagtcagaacacaagccttacgcaacatcaacggatccacactggtgagaaaccatacacatgtaaggaatgtgggaaaagctttactcgaaacccagcccttcttcgacatcagagaatgcacactggggagaagccttacgaatgtaaggactgtgggaagggcttcatgtggaactcagatctttctcagcaccagagggtccacactggggacaagcctcatgaatgtactgactgtgggaaaagcttcttttgcaaggcacatcttattcgacatcaaagaatccatactggggaaagaccctataaatgtaatgactgtgggaaggccttcagtcagaattctgtcttaattaagcaccagaggcgccatgctagagacaaaccctataactgtcagatctctcaccttcttgaacattagagagtgcataatggtgatacttgtttataattcttatgctgcaggaaccctagagacaaaatgagatgaccattcacaatttgctgtaacccttaacttaaatagccagtattatcttgcccttttgaacatttaccatgtactctagcaagactggtccctctgttctatgatgttttaacaaggcatcatttagttgggcagctactctgtatcaggtgctaaccactttacatacattaatttgcataacaatcctattaaggtaggtgctcttctccccattttacaaatgagaaatctgagttgaaagaggttataaaactcattcagggttgctcagttagtaagttatagagttgaaattggagccaggcctatctgactgcagagtttactgttctttacttaattgtacatatttatgtctctgcccatttttatttgcttattttcctgtgcttttagtttcccttcatcactcagatctagctccaactaagaagatctctcttcctcttctacttgtaatcagtaccacccaagttagtatttaattatgtgccatcttatatttttctaatagtctcatgtcttttaatcttaaccccagctaaatgactctgaggaccaacagtacatttcttttatgtttttcaaatcctgaaacattaatctttgactagatataacatgctcatgataaaaaagagttgaaatagttgaaaagggtgttcagtgaaaagtaaatttccttgtcattcctatctcttgagttctccccagaggcaatcactgctactggttgtgtatctctgtagatactctttgtatacaagtgtttattagtattgcttttcataattctgtctcactgaaaaccttatttgatggaagcaacattgcagttaaattgtgaactct

SEQ ID NO: 4407 - DNA, 2931 bp, Homo sapiens
agaatgagtgacggggaggcggtgcgggcgtcggaagggaatctccgggcggggtagtgcaggcgccgggtttcccgcggtccgagctggcgcgggcggaggagaatcgctcttaaagggccagcgcacacgcgttcttttgttccggggccgcagggcggggcaggcccgactttcgccgtcttcttgtctactctccagaacggccatgatttcccaattcttcattctgtcctccaagggggacccgctcatctacaaagacttccgcggggacagtggcggccgggatgtggccgagctcttctaccggaagctgacgggactgccaggagacgagtccccggttgtcatggactatggctatgtacagaccacatccacggagatgctgaggaatttcatccagacggaagctgtggtcagcaagcccttcagcctctttgacctcagcagcgttggcttgtttggggctgagacacaacagagcaaagtggcccccagcagtgcagccagccgccccgtcctgtccagtcgctctgaccagagccaaaagaatgaagtttttttggatgtggtcgagagattgtctgtactgatagcatctaatggatccctgctgaaggtggatgtgcagggagagattcggctcaagagcttccttcctagcggctctgagatgcgcattggcttgacggaagagttttgtgtggggaagtcagagctgagaggttatgggccaggaatccgggtcgatgaagtctcgtttcacagctctgtgaatctggacgaatttgagtctcatcgaatcctccgcttgcaaccacctcagggcgagctgactgtgatgcggtaccaactctccgatgacctcccctcaccgctccccttccggctcttcccctctgtgcagtgggaccgaggctcaggccggctccaggtttatctaaagttgcgatgtgacctgctctcaaagagccaagccctcaatgtcaggctgcacctccccctgcctcgaggggtggtcagcctgtctcaggagctgagcagcccagagcagaaggctgagctggcagagggagcccttcgctgggacctgcctcgggtgcaaggaggctctcaactctcaggccttttccagtctcggaagggtgctgacctggaccgggagaagaaggctgccgagtgcaaggtggacagcatcgggagcggccgcgccatccccatcaagcaggggatcctgctaaagcggagcggcaagtccctgaacaaggagtggaagaagaagtatgtgacgctctgtgacaacgggctgctcacctatcaccccagcctgcatgattacatgcagaacatccacggcaaggagattgacctgctgcggacaacggtgaaagtgccagggaagcgcctgccccgagccacacctgccacagccccgggcaccagcccccgtgccaacgggctgtccgtggagcggagtaacacacagctgggtgggggcacagaggcagaggagtcgtttgaatttgtggtggtgtccctcactgggcagacgtggcacttcgaggcttcaacggcggaggagcgggagctgtgggttcagagtgtgcaggcccagatccttgccagcctgcaaggctgccgcagtgccaaggacaagactcgactggggaaccagaacgcagctctggctgtgcaggccgtccgcaccgtccgcggcaacagcttttgtatcgactgcgatgcacccaatccagactgggccagcctgaacctgggtgccctgatgtgcattgagtgctcaggcatccaccgacacctgggggctcacctgtcccgggtgcgctcccttgacctcgatgactggccgcctgagctgctggctgtcatgactgccatgggcaatgccctcgccaacagcgtctgggagggggccttgggtggctactccaagccagggcctgatgcctgcagagaggagaaggaacgctggatacgggccaagtatgaacagaagctcttcctggccccactgccaagctcagatgtgccactggggcagcagctgctccgggccgtggtggaagatgacctgcggctgttggtgatgctcctggcacatggctccaaagaggaggtgaatgagacctatggggacggggacgggcggacggctctacatctctccagtgccatggccaacgttgtcttcacgcagctgctcatctggtacggggtggacgtgaggagccgggacgcccggggcctgactccactggcatatgctcgccgggccggcagccaggagtgtgcagacatcttgatccagcatggctgccctggggagggctgtggcttagcgcctacccccaacagagagcctgccaatggcaccaacccctctgctgagctgcaccgtagtcctagcctcctataaggcccaggaagagggcagaggggccagaaggactccatggcccaaagaccctcctccctgcaggcactgtggggacagacacagagatggagaagcagggacatgctgagaggacgaagccaaggaaattagggaggagagtcaaagggatcaaggagagttggggatttgagctgcagcagagagggatgagggatttagccctctgccctaaggtgccattgaaaagggacaggacccttcggaggtgcctgtgaggagaggggagcaggacctctccctcctccggatccctgcctcctagtgccagcccctcacacgccttcatcctgaaacaggaagaggacggcaccaagttgggggtgctggatgaaagagacgaggggtgatctgtgagtcccatgtaaactttgtacattggaatatttgtgtttgtgtacatatttgatgtgtgtgtgtatgatgagccaataaaccagactgtgtgcgtg

SEQ ID NO: 4408 - DNA, 2378 bp, Homo sapiens
taaaaaaacgaacctatgattgattggagtaccagaagaagatggagagaatggaaacaagctggaaaacacacttcaggatattttccaggagaacttccccaacctagcaagacaggccaacatgcaaattcaggaaatacagagaacaccactaagatattccaagagaagatcaaccccaagacccttaatcattggattctccaaggtcgaactgttaagggcagccagagagaaaggccaggtcacctacaaagggaagcccatcagaccaacagcagacttctcagcagaacctctacaagccagaagagattgcgggccaatatccaacattcttaaaggaaagaattttcaacccagaatttcatatccagccaaactaataagcttcataagcgaaggagaaataaaatcctttccagacaagcaaatgctgagggattttgttaccacgaggcctgcactgcaagagctcctgaaagaagcactaaatatggaaaggaaaaaccaataccagccactgcaaaaacacaccaaaatataaaaaccactgacactacgaagaaactgcatctagtgtgcaaagtaaccaaatagcatcatgacaacaggattgaattcacacataacaatactaaccttaaatgtaaatgggctaaatgtcccaattaaaagatagacacagactggcaaattggataaggagttaagacccattggtgtgctgtattcaggagccccatcttatgtgcaaagacacacacaggctcaaaataaagggatggaggaaaatctaccaagtaaatggaaagcaaaaaaaaaatgggagttgcaattctagtctctgacaaagcagactttaaaccaacaaagatcaaaaaaggcaaagaagggcattgcataatggtaaagggaacaattcaacaagaagagctaactattctgaatatatatgtatccaatacaggagcacccacattcataaaacaagttcttagggacctacaaagagacttagactcccacacattaatagtgggagactctaacactccactgtcagtgttagatcaacgagacagaaaattaacaaggaaattcaggacttgaactcagctctcgatcaaatggacctagtagacgtctacagaactttctaccccaaatcagcagaatatacattcttctcatttccacatggcacttattctaaaatcgaccacataattggaagtaaaacgctcctcagcaaatgcaaaataactgaaataataacaaacagcctctcagacctcagtgcggtcaaattagaactcacaattaagaaactcactcaaaaaccacacaatttcatggaaattgaataacctgctccttattgactcctggatagatagtgaaattaaggcagaaataaagaagttctttgaaaccaatgagaacaaagagacaatgttccagaatttctgagatatagctaaagcagtattaagagggaaatttctagcactaaatgcccacattagaaagctagaaagatctcaaaacgacaccctaacatcacaattaaaagagctagagcggcaagagcagactaatccaaaagctagcagaagacaagaaataactaagagaagaattgaaggagatagagacatgaaaaaccctccaaaaaaatcaacaaatccaggagctggtgttttgaaaacattaacaaaatagataaactgctagctagactaataagaagagagagaagaatcaaatagatgcaataaaaaataataaaagggatatcaccactgaccccacagaaatacaaactaccatcagagaatactatgaacacctctaagcaaataaactagaaaatctagaagaaatggacaaattcctggacacatacaccctcccaagactaacccaggaaaaagttgaatccctgaatagaccaataacaagttctgaaattgaggcagtaattaatagcctatcaactagaaaaagcccacaaccagatgattcacagccaaattctaccggaagtacaaagagaagctggtaccactccttctgaaactattccaaacaattgaaaaggagggactcctccctaactcattttatgaagccagcatcatcttgataccaaaaccaggaagagaaacacacacaaaaaagaaaacttcaggccaatgtccctgatgaacattgatgcaaaaatcctcaataaaatactgccaaaccgaacccagcagcacatcaaaaaacttaatccatgtcatcaagtcagcttcatccctgggatgcaaggctggttcaacatacgtaaatcaataaacataatccatcacataaacagatccaaagac

SEQ ID NO: 4409 - DNA, 3070 bp, Homo sapiens
atcccggtggccacggccgccgcgctgctggtcggctccagcaccctcttcttcgtgttcacgtgcccgtggttgacacgagctgtgtccccagctgttcccgtctacaatggcatcatcttcctctttgtcctggccaacttcagcatggccactttcatggaccctggtgttttcccccgagcggatgaggatgaggacaaggaggacgacttccgggctccgctgtacaagaacgtggatgtgcgaggtatccaggtccgcatgaagtggtgtgccacgtgccacttctaccgcccgccgcgctgctcccactgcagcgtctgtgacaactgtgtagaggactttgaccaccactgcccctgggtcaacaactgcatcgggcgtcgaaactatcgctacttcttcctgttcctgctgtcactcagtgcacacatggtgggcgtcgtggccttcggcctggtctacgtgctgaaccacgctgaggggctgggagccgcgcacaccaccatcaccatggctgtcatgtgtgtggccggcctcttcttcatccctgtcattggcctcactggcttccatgtggtgctggtcactcgggggcgcaccaccaacgagcaggtgactgggaagttccgcgggggtgtgaaccctttcacccgaggctgctgtgggaatgtggagcacgtgctgtgtagccccctggcgccccggtacgtggtggagccaccccggctgccgctcgcggtgagtttgaagccgcctttccttaggcctgaactcctggaccgagctgcaccgctcaaggtcaagcttagtgacaacgggctgaaggctggcctgggccgtagcaagtccaagggcagcctggaccggctggatgagaagccactggacttggggccaccactgccccccaagatagaggctggcacgttcagcagtgacctgcagaccccgcgcccaggcagtgctgagagtgccctgtcggtgcagaggaccagccccccgacacctgccatgtacaagtttaggccggctttccccacgggtcccaaggtgcccttctgtggaccaggcgagcaggttccaggccctgattccctgaccctgggggacgacagcatccgtagcctggactttgtgtccgagccgagcctggacctccctgactatgggccagggggcctgcatgcagcctacccgccatccccaccgctcagcgcctctgatgccttctcgggcgctttgcgctccctgagcctcaaggcctcgagccggcggggcggggatcatgtggccctgcagcccctgcgctctgagggggggccccccacgccccaccgtagcatttttgccccccatgcactgcccaaccgcaacggcagcctgtcctatgacagcctgctcaatcctggctcgcctggtggccacgcctgccctgcccacccagcagttggcgtggccggataccactcaccctacctgcatcctggggcaacgggcgacccgccacggcccctaccccgcagcttcagccccgtgctgggcccccgcccccgggagccctcgcctgtgcgctacgacaacctgtccaggaccatcatggcatccatccaggagcgcaaggacagggaggagcgtgagcgcctgctgcgctcccaggccgactcactcttcggcgactcaggcgtctatgacgctcccagctcctacagcctgcagcaggccagtgtgctgtccgagggcccccgaggtcccgcgctgcgctatggctccagagacgaccttgtggctgggcccggcttcggtggcgcccgcaaccctgccctgcagacgtcactgtcctcgctgtccagctccgtgagccgtgcaccgcggacgtcgtcctcctccctgcaggctgatcaggccagcagcaacgccccggggccccggcccagcagtggctcacacaggtcacctgcacgccagggcctgccctccccgcccggcactccccactcaccatcctacgcgggccccaaagctgtcgccttcatccacacggacctcccagagccaccgccctcgctgaccgtgcagagggggcggattggcacctgcacccgtggatgggggcggcgtggccagccttgggtgcctcctgggctgcacctgtgccaccttggccgcccggaggaccgcccaccactgcgggccccctggagccaggccgccggggcacccccacgcggggccatgtgccgcctgcacttggctgcctccagtcttttccccagcctctcggggccctagcaggatgacaagtaggcggctctggggcccaggacagcccagctggggacccaggaggtcagactgcagtggaccctggggcagggctgggggtgggctgggctctctgctccaccagccacagcttgacagattcccagcctgccagggcctgagaccctgtgtccacatgacctcagggagtcccccacctgctgcagggggtccagcaccccacaggggggcagtcccagagctgtggggaccggcacgacctttgcccagcctccctacccaaccaagcactttagactaagccacttcctcctcggggagcccaggcctccgtgggttgggctgggtggggggggggtctcaggttgcccctgaaggtctctgcactcctcctgcccttcccctgacacatgaacagatgccttaacttcctggagccaccagcctggtgagccattggcctctgcctgccaccaaggtcctgtggtcttggccagctccgcctgggccccactggggctgcctgcacccagagacgatgccggcgggatctcagagggcctgaggcccaagccctgtgtcctccagcagtggtacggcctgcggcagggtggcactccggccagcccttctccgtcacagggtccctgtccctgggtccaccctgggctgtggctctacatctcccatttggggacgagaaagccacaaaaccattctctattgttcttaagggtacccctgctaattaattccccaaataaaatttttggtgttgatc

SEQ ID NO: 4410 - DNA, 3158 bp, Homo sapiens
actcactgttgttgctggcagaatacgtacaccaatgcggacaagctcctagaagcagcagagcagttggctcagacgggggaatgtgaccccgaggagatctacaaggcagctcgacacctggaggtgcgcatccaagacttcgtgcgcagggtggagcagcggaagcttctcctggacatgtctgtttccttccacacacacaccaaagagttgtggacatggatggaagaccttcagaaggagatgttggaggatgtctgtgcagattctgtggatgcagtccaggaactgatcaagcagttccagcagcagcagaccgccactctagatgccacactcaatgtcatcaaggaaggcgaagaccttatccagcagctcagggactcggctgtgtccaacaacaaaacaccccacagcagctccatcagccacatcgagtcggtcctgcagcagcttgatgatgcccaggtgcagatggaggagctgttccacgagcggaagatcaagctggacatcttcctgcaactgcgcatctttgagcagtacaccatcgaggtgacagcagagctagacgcctggaatgaagacttgcttcggcagatgaatgacttcaacacagaggacctaaccctggcagaacagcggctgcagcgccacacagaacggaagctagccatgaacaacatgacctttgaggttatccagcagggacaggatctgcaccagtacatcacggaggtccaggcatcaggaattgagttgatctgtgaaaaagacattgatctggcagcccaggtgcaagagttattggaatttctccatgagaagcagcatgaattggagctcaatgcagagcagactcataagcggctagagcagtgcctccaattacgtcacctccaggctgaagtcaaacaggttctgggatggatccgcaatggagagtcaatgctcaacgccagcctggtcaatgccagctctttgtcggaagcagagcagctgcagcgggagcacgagcagttccaactggccatcgagtccctctttcatgccacttccttgcagaagacgcaccagagtgccctgcaggtacagcagaaagccgaggtgctgctccaggccggccactacgatgccgatgccatccgggaatgtgctgagaaggtggccctccactggcagcagctcatgctgaagatggaagaccggctaaaattggtcaatgcctctgtggccttttacaaaacttctgaacaggtgtgtagtgtcctggagagcttagagcaagaataccggagagatgaggactggtgtggtggacgagataagctggggccagcagcagagatcgaccatgtcattcccctcatcagcaaacatttggaacaaaaggaggcctttcttaaggcctgcaccctggctcggcggaatgctgaggtgtttctcaagtacatccacaggaacaacgtcagcatgcccagtgtcgccagccacactcggggacccgagcaacaagtgaaagccatcctgagtgagctcctgcagagggagaatcgcgtgctgcatttctggaccttgaagaagcggcggttagaccaatgccagcaatatgtggtgttcgagcgcagcgctaagcaggcgcttgactggatccaagaaacaggtgaattttacctctcaacacatacctccactggagagaccacagaggagactcaggaactgctgaaagaatatggggaattcagggtgcctgccaagcaaacaaaggagaaggtgaagcttctgattcagctggccgatagctttgtggaaaaaggccacattcatgccacggagataaggaaatgggtgaccacggtggacaagcactacagagatttctccctgaggatgggaaagtaccgatactcactggagaaagccctaggagtcaacacagaggataataaggacctggagctggatattatcccagcaagcctttcggatcgggaggtcaagctgcgggacgccaaccacgaagtcaatgaagagaagcggaagtcagcccggaagaaagaatttattatggctgaactactccagacagagaaggcttatgtaagggatttgcatgagtgcttagagacctacctgtgggaaatgaccagtggtgtggaggagatcccccctgggatcctcaataaagagcatatcatctttggcaacatccaagagatctacgatttccataacaacatcttcctcaaagagctggagaagtacgagcaactgcctgaggatgtgggacactgctttgttacctgggcagacaaatttcagatgtatgtcacctactgtaaaaacaagcctgattccaaccagcttatcctggagcatgcgggcaccttctttgatgagatacaacagcggcatggtctggccaactccatctcttcctacctaattaagcctgtccaaaggatcaccaaatatcaactgctcctgaaggaacttttaacttgctgtgaagaagggaaaggggagctcaaggatggcctggaggtgatgctcagtgtcccaaagaaagccaatgatgccatgcatgtcagcatgctggaaggtagctgtcctcccagcactggggaagcctcctctcttcctagacacgggggagcttgtatcatgggagggaagtggcatgaagttagacaaggtgcaaggctggaagagagaagaaatgacaagtagttacataggcccttgtcatgtgagaggggctccacaaggaccaatttggctagcaccctgcttctaggaaggaccaggcctaagccactggaggttatgtggacatgttgctgcccatgagacagtccaggacaggccatcaccctcactgttgatgtgctagagcttccaacctacagcagtcttgttagtctgcatagcatctgcattacattgccttggtcatcacaatgaatagaaagcctgatcacataaacacacacagacacacatacacacaaaacataccatcttcagccttatgctctttttttgttattatggtaaaatatacataatatgtataacataaatttaccattttaaccatttttgaatgtacagttcggtggcattaaatacattcacattcttgtgcaacc

SEQ ID NO: 4411 - DNA, 3978 bp, Homo sapiens
tttgtgatattaggcatttggatgattgggcaaaaagccagctgattgaaatgctcaaacaggcagcagccctggtgataactgtgatgtatactgatggttccacccagctaggagctgaccagacccccgtttcttctgttagaggaattgtggtgttagtaaaacgccaagcagagggtggccatggctgtccagatgccccggcctgtggtcctgttctggagggctttgtgtcagatgatccatgcatctacattcaaatagagcactctgctatctgggaccaagaacaggaggcacatcaacaatttgcccggaacgtgctatttcaaacactgaaatgtaaatgtcctgttatttgttttaatgctaaggattttgtgagaatagtgctgcagttttttggtaatgatagcagttggaagcatggattatggtttatggcaactattttgtactttggagcttcctctgataccaattttggcagtgatggaaagccacgccattcaggtgaacaaagaggagatggagaagacgtcagcacttcttggggctcgtctcaaggaattggagcaagaagctcattttgttgcaggagaacggtttcttataacgagcaataaccagcttcgagagatcctctttggcaagttaaagctgcacctgctgagtcaaaggaacagtctccccagaacggggttgcagaaatacccgtctacatcagaagcagtgaatatccaaggtatctccaagcacccaattcagattactacacctaagaattttaaaggtaaagaagacaagattctcacgatctccccgagggccatgtttgtttcatccaaaggccacacctttctagcagcagacttttcacagattgaattgcgcattcttacacatttatctggagatccggaacttctgaagttattccaggaatctgaaagagatgatgtattttctactctgacttcacagtggaaggatgtgcccgtggaacaggtgacacacgcagacagagagcaaaccaagaaggtggtgtacgcggtggtctatggagcagggaaggagcggctggctgcttgccttggagttcctattcaggaagctgcccagtttttggagagttttttgcagaagtacaagaaaatcaaggacttcgcccgagcagctattgcccagtgtcaccagacaggctgtgtggtgtccatcatgggcagaaggagacccctgccaaggattcacgctcatgaccagcaactccgggcacaagcagagcgacaggcagtgaacttcgtggtgcaagctcagagccagcacctctgtgtggaggtaccgtgagagctgtggcgatggtgcagaatgctgagtgcaccatgaaccgtgtgccatgggacctcaagacagtaccacgcgccccataggctccgctgctgacctctgcaagctggccatgatccatgtcttcactgcagtggctgcttcccacaccttgacggccaggtcagtgggtggtggtctcccagggcttggatgggagggttagtattctgtgggaagaccccctcggggctcgtgattctgatgatcaccatctctgcttatcgggcccccgtcccctcctgaggctctcagcccatggaaggccctgggggctactcacagcaggcatgcagacaacaaccagccatccaccagcgtggggtgcagatgaggcctctccagacagaaatgctgtctcccccagacccctcctcctcggggtgtctgcacagcacaggggcaccccttgaggctgcccaccccagaggcaggcgaacccctcagccccttgagcaggaccctggggactccaaactgcccccacccctgcctgttgctgccaccaatgccaggcagtgtgccccacgcccagctctgcccccacccctacctgttgctgccaccagtgccaggcagtgtgccccacgcccagctctgcccccacccctacctgttgctgccaccagtgccaggcagtgtgccccacgcccagctctgcccccacccccgagcccagagccaacatgcagatgtgccttggtgggggggggctccgccctggctgccccccaggccacagctctctcaggcctctgtccctgcctcagttattcccccagggcacattcctcaagagtgtgggtggccaggggacaagcagccctcgcccagccacctcctccttgccagccaaggcctgggggtgctgcaagtggtgacccagacacctcctctcctcgttctccttgtgcgggatcccctcaggagtcccggagccccttctgggagctaacctgccccagccccccacagtgtcagtccccgaagggcccctcgccctctgacacaccatggacgttttcccacccccaccctaagagccctcaagctcttggcgacagtcccgtgggggtctaagcactgccccagggactctgcttgcagcttcactgggctgtgggctctcagtgctgctttctgcagtaactgaagtggtcagaaggcaggagtggggcattagaagattcactctcggctgggcacagtggctcacgcctgtaatcccagcactttgggaggccgagacgggtggatcacctgaggtcaggagtttgagaccaacctggccaacagggtaaaacatcgtcactactaaaaatacaaaaattagccaggtgtggtggcgcacacctgtaatcccagctactcaggaggctgaggcaggaggatcgcttgaacccaggaggtggaggttgcagtgtgccaagatcgcaccactgcactccagcctgggtgagagcaagactctgtctaacagaaaaaaaaataagattcactctcagtcctctcctgccccatctcactgccatctgcattcattcccaacacacacgtgcacacacacgcacacacaagcacatgcacccatacacgtgttcacccatgcatacaacccatgcacacacatatacgcatatacactgatgccaggcagcctctagtgccccacagtgttctcatggtgtcctgaaatccatgcatcccgctcacttccacagtttctgcaggtaaattatagcttctcccaggatatgagcagcttgtgctagtttccgtcttggcaggaactgaaagccaaatggtggtcctgcctctaagatactgcaagtctagaaaagttgattcaaggctgggcgcagtggctcacacctgtaatcccagcatttgggaggccgagtcgggtggatcacttgagctcagaagtttgtgaacaacatatgtgttgcctgggcaacataatgaaacctgtctctacaaaataaaagctggccatggtggtgcacacctgtagtcccagctactcaggaggctgaagtgggaggatcacctgagcctgggagttcaaggctgcagtgagccatgatcataccactgcactccagcctgggcaacagggcaagaacctgcctcaaaaaaagaaaaaatcggttcactttcagcccttgtggaattgataaaggaagttggcatgtgaggagctgaggtctctctctgttgctgactgagtccttctgaaagctggacacagacacttttactcaggaacgcagttactcgctggtcatccttctgtcatcagccattggctgtcacgaggaaatgcttctcatagcaaaatgcaaagcagactcgtgtggaatattgggcacatggtctgtgttttgtgaacgtgatttgttcttccaggagtaatgtgaaaggctgtggatggcgtctggaagggacgggtgcaggctcagtgtggccaggcatctctcgctgaagcagcaggcatgaaactcgatcactgggaggcacacggtgcccctagagtgagctgagatcgcaccacttcactccagcctgggcgagagcgagagtctgtct

SEQ ID NO: 4412 - DNA, 2281 bp, Homo sapiens
agtctttactgctctgtgtattctgctcctagaggcccagcctctgtgactccgttatctgcaggtattgggagatgcacagctaagatgccaggaccacctggaagcctagaaatgggaccactgacatttagggatgtggccatagaattctctctggaggagtggcaatgcctggacactgcacaacggaatttatataggaaagtgatgtttgagaactacagaaacctggtcttcctgggtattgctgtctctaagcctcacctgataacctgtttggagcaaggaaaagagccctggaataggaagagacaggagatggtagccaaacccccagagtcttactgtgttgctcaggctgatcttgaactcctggtctcaagttatcttactgccttggcctccctaaagatgtgggattacagaaataatccactttgccaggctactatgtagcccttcatgtagaactgtgctagtcataatgaatcataacactgtcaccttttattttgaaaagtctttatttttatctgtttttaaagtacactaatcttgaatcaagtattcttggttaggaattttattactgcatcaaaatttgggaagttcttagcctttttcatctacaagtaacctctacattactttttccctacattcttcttctaagagttttttaatgaatatattgatgtacttgatggtgtccaataagttttacatttcatgttttaattttcttttggaattttatatttttgttttatatattttaggatatgccacctcacatgagttaattgttttggttttttagtttatattataattgagtatgccagtatttaactctgtaaaatttaagacagtgtggaacaaagtcaaatatgaatcagccatatgtctactaccaatataacgatctctgtgtttacctgtataaatattttccctgttctttttatgacttgtatatttctggtataggtttgttgcaaatggttatttaatcttgactaggtgagaagtcatagaaattctcctaatttcaacatctatttattcatggatctatattatttttgtgtgggagaaaaacttttctatttaaagataatttacaaacgatcataatctcttttaggtatgtctatttttacttgtcaaaaacacataacatttacaatagaatatttttaaatgtttattttagtcctattatattgacattgttatgcaacatattcctaaaatgtttttatcttgcaaagctaaatatcaatacccattaaaaaactatgaattttacccatttcctggcacttttcaaacaccactctgttttctctaagagtgtaactgcttcatatatctcatacaatctctgtctttttgtgactggctcattttattttgcacaatatcatcaagctttatagttgttagaatattttctgctttttaaatactgggtgatatttaagtattttgtattttagattatatctactgagtaatttggtgacaaatttgcactgcttttacctattggctttcagtaacaatgctgcaataattacaggtatgcaaatgacctatatgatcatatatgtgtaagtttatatatgtgccgcattctgttctactagtgtacgtttttacctttgtactcataccaaattgttacaattctgtagctctgtaatgtgtttcaaaatcagaaactgtaatgccttcaaaattgtttattttattgcagatttttgggtactttattatctcttaagactttatatactttgggggttgctgtttctatttcttcaaaaatgcatgagaaatttgaacaacattgcattaaatctgtaaattacattgagcaggatggacatcttcacaagattaattattttaacatttcaacaagcatgctcaagagtgtattgttttaatttctatgtatttgtgaatttttcagttttttcttcttactgttctatactcatttcattttggtcatagaaagtaatccataaaaatttagttttaaataatttgttaagacttcttttttggtttaccaggttttctatcaaggagaatttcgtatgaggtattgagaaggctgtttatcattatgttgttgagtgttctttatgcctctgttattaataattgttttatactcccttcaagcccggtttctttaccaatattttgtctttttaaaatctttattacagaaagtgaagcattaaaatattctactataatt

SEQ ID NO: 4413 - DNA, 2230 bp, Homo sapiens
gcattgctgcgctcccgtgcccaagggagccacgcgccgcgtgcgcccggcagccggccgcccgcggccatggccgtccggcccggcctgtggccagcgctcctgggcatagtcctcgccgcttggctccgcggctcgggtgcccagcagagtgccaccgtggccaacccagtgcctggtgccaacccggacctgcttccccacttcctggtggagcccgaggatgtgtacatcgtcaagaacaagccagtgctgcttgtgtgcaaggccgtgcccgccacgcagatcttcttcaagtgcaacggggagtgggtgcgccaggtggaccacgtgatcgagcgcagcacagacgggagcaatgggctgcccaccatggaggtccgcattaatgtctcaaggcagcaggtcgagaaggtgttcgggctggaggaatactggtgccagtgcgtggcatggagctcctcgggcaccaccaagagtcagaaggcctacatccgcatagcctatttgcgcaagaacttcgagcaggagccgctggccaaggaggtgtccctggagcagggcatcgtgctgccctgccgtccaccggagggcatccctccagccgaggtggagtggctccggaacgaggacctggtggacccgtccctggaccccaatgtatacatcacgcgggagcacagcctggtggtgcgacaggcccgccttgctgacacggccaactacacctgcgtggccaagaacatcgtggcacgtcgccgcagcgcctccgctgctgtcatcgtctacgtggacggcagctggagcccgtggagcaagtggtcggcctgtgggctggactgcacccactggcggagccgtgagtgctctgacccagcaccccgcaacggaggggaggagtgccagggcactgacctggacacccgcaactgtaccagtgacctctgtgtacacagtgagtcctctctgccctgaggtcctcttctgtttgcctggattggccttgcccagccctggggaggtgggggctgagggagctattctcctgccaaaggctgtagcctctccaggctcaggacccactgagatccccctcatccttagcatacctgcacatgggcccaggcgcgccccaccacctcccatgcctcctgagacgggcacagatttgaaccttgattcatgcacacccattgcccacacttacccaacaccacagcttcacatctgcccacactcaccaacaccacagcttcacatctgcccacgctcaccccacaccacagcttcccatctgcccacgctcaccccacaccacagcttcccatctgcccacgctcaccccacaccacagcttcccatctgcccacactcgcccaacaccacagcttcccatctgcccacgctcgccccacaccacagcttcccatctgcccacactcgccccacaccacagcttcccatctgcccacactcgccccacaccacagcttcccatctgcccacactcgccccacaccacagcttcccatctgcccacgctcaccaacaccacagcttcccatctgcccacactcgccccaacaccacagcttcccatctgcccacgctcaccaacaccacagcttcacatctgcccacactcaccaacaccacagcttcccatctgcccacacctgccccaacaccacagcttcccatctgcccacactcgccccacaccacagcttcccatctgcccacactcgccccacaccacagcttctcatctgcccacactcaccaacaccacagcttcacatctgcccacacctgccccaacaccacagcttcccatctgcccacactcgcccaacaccacagcttcacatctgcccacactcaccaacaccacagcttcccatctgcccacactcgccccaacaccacagcttcccatctgcccacactcgccccaacaccacagcttcccatctgcccacactcgccccaacaccacagcttcccatctgcccacactcgccccaacaccacagcttcccatctgcccacactcaccaacaccacagcttcccatctgcccacactcgccccaacaccacagcttcccatctgtccacgctcaccaacaccacagcttcccatctgcccacactcaccaacaccacagcttcacatctgcccacactcaccccacaccacagcttcccatctgctcacatcaccccat

SEQ ID NO: 4414 - DNA, 2103 bp, Homo sapiens
acgtccaacgctgggccgaccccagatacacaggcagtcgggattcccgcccggtgcgcttgtctattcatccctctgcgtcaggctgggacgcgctccgtctgtaaaaggctcaaacgcatctcccgccgcggggcgggatctaggggcccaggccccggggtccagaggcgggtaactttgctaatctcccccagcggcggggaacgtcgcgcaaccgctgagccctgtccgccgagactaaacaagcagaggaacaggctgtaaacacacatcctgacacgcagggatgttgctcttggagaatgtgaagacagtttgcttcttgacaagcgagcgaacgggcgcccagatttttgcagcctttccgagtctcccccgagggagaggcggcagagaaaaccccggatttgggagccaccagggaaggatccgcgcaggggagccgccctccttggccccagacccgcctgcctggggccccctttgctcactgtcaatgtatggtctgaagctctgaggatggtgctgggactggggtcgggggaagcctcttgaataataactgcaaagaagaaagaggcgagaacgtctccctaaccttgaagcagaaaggactgtgttcttaaagctgttggctgcagtcacagggccagttgcccgcctctgttccctgagtaaagtgtaacatcttctgtcctcctggcttgcttgcaccattcagcaaattatactccttccttaccaaagtgggaatgctcagggaagtgtgtgtgtgtgtgtgtgtgtgtgtgtgtgtgtgtcccctctgcactgaggctgctgttagagatgttaccaatttaaaccttccagaatcctggaggtttacattttgtaaagggaggggacactcctggactgtcacaatcccaattctggttagagtggcagggactgaacaaagccaccaacatgcaaaagtccatctccagagtagcatgcatgcccccaggaaacccccagtgggatatgcttcctgcactttccccttctctctaacctctgtctcctgtttgtaaggcagaggaagggtgattccttgccactgcacaggaatgcagggttagggttatctccaagaaagggtggggtgaggctgagtcacagggagagcagaaaagctctgtatcttcaatgaggacccacacacacacacctttcccaggcttgtgggcctcattcagcaaagcagggagtgttttatattgatgcgagaggctgtcagtcagcagtaaatcagttcaggcatagctatctctttctttacgaaatcagctcattgccttggtcacactacacagaaaatctgcttatcaccgctatcggcaataaaaattagtggagccttagttgtttccgaagaggaaccccgtgtctgtgacattagaatagataagtggcttggcctgttgcaggcagagagaagcccaattcctcctcctcttctccctgcagcgatctgaacaattctgaaaccgcctccctgggcgtcagctgagcaggttggggaactaaccagggctctctctctagggccctgttaaatgcactgaacttaaaatgaaacacgaagtgtgaatttcaggtttgaacatgatgcatcaggaaacgtggaggttggcagcccttttcctccctcctgcttttcagtagcaggtattaatattgtattaaatgttatgagaaagtaaaggctgcggagaggaatgtgctcagatgcaattttgtcaaggtttttatctgtgattatgattccagatgtagaaactcccggaggagggaaatgaggggctgctggcatgtgacatgtgttttaaggtgtttggcagtgtttctcaaagtggtgacaaaatgttcaattttattacagggaattggtaaaagaaatatgaatactaggtcagagattgttcacctcagcaaaaggatttaccattattgattagggtgcagaaagtatgtatctaggtcctgcttaaatcacattgtcaacaatataaatctgtcagatcagatttttctgaaagaacaattgtaacaaaatacactatagctaattgc

SEQ ID NO: 4415 - DNA, 2277 bp, Homo sapiens
aatatggcagcgcccagcaacaagacagagctggcctggagtccgcggctggccgcgtgagtaggtaggtcgcgcgcgggtaggcgaacgcgaactgctgggctgcaggcgggcccttcaggacccggcagcgcgagagggcagccctggagggacccagctgcagggccagggcgccatgacctttcgtagtgggggcggggacgcgctgggaaaggccgcctgtcttgtgccagccgcctcacgcccccagtctcccattttgcagatgacctcgcgagaggtcacgccgcaagtcggcaaccgggcaggatttggaatccgcgtctgcctctttcccccaagagacccagaatcctggcagccggtttcaaagctgttgtacgtacaccatacctcggggttcagatttataggtgtttttttgaaattgaggcttgtttccgttcagttgttactcgttaggcatctgtcatataccaggcactgtccttggtgctggagacacagcaatgaggaagatagataaaaatctctcatctcctgggggaaccagactttgaacaaattagaaataaacgaaacaggtgatttcagatactgataagttactaaaaatgcgttaatggtgtcgggaatttcgcttgagcccgggagtttcgagaccagccttggcaacatggcaagaccctgttctctacaaaaaattatctgggcgtagtggtgcacgcctgtagtcctagctactcgggaagctgaggtgggaggattgcttgagcccaggaggttgaggctgtagtgagccgtgattgtgccactgcaccccagcctgggcaacagagcaggaccctgtctccgaaacaaaaattaatagggtgatgagggcttttagaatgtggggaatgggagatggtcaaagaagacctttcattgaaatgaccagagacagctgtgggcagatctggaggaagaaagctctagacagagagaaaagcaagtacaaaggttctgagatgggataaacttagtttctttcagaaacagtgtagctgaagctgccagtggtaggagttgagtttagaggggtagaccctatctgattttatttatttatttttattttttagagacaggatctcacttgttcgtcaagcctggagtgcagtggtgcagtgcactccatagctcactgcagcctcaaactccatggctcaagtgattctcctgcctcagctttcccagtagctggaactacaggtgcacaccaccaggtccagctaattttttaaaataatttttgtaaagatcgtgtcctgctatgttgtccaggctggtcttgaactcctgggctcaagcgatcctccccacttggacttccaaagcactaggattataggcatgagccactgctccctggctatttatttatttttagagacaggatctcagtatgttgcccaggctagagtgcagtggctattcacaagtgcagtcatggttcactgcaacctctaactactgaccttaaaggatcctccagcctcagtctcctgagtacctgggatggcaggcgttcaccaccatgcctggataattcttaattttttttgtagagatggggtctctctatgttgcccaggctggtcttgaatccctgggctcaagtgatcctcctaccttggtctcccaaagtgttgggattacaggcatgagccagtgtgcccagtctctgattttaagtgtgatatgccgttagcgattttaggcagaaatcactaattttagttgatttatttatttatttagcgatggagtctcgctctgtcgcccagactggggtgcagtggcacaatcttggctcattgcaacctccacctcccaggttcaggtgattctcctgcctcaggctcccgagtagctgggattgcaggtgcctgccaccacacctggctaatttttgtatttttagtacagacgggctttcaccatctcggccaggctggtcttgaactgaccttgtgatcctagcactttgggaggccaagatgggtggattgcttgaactcaggagttcgagaccaccctgagcaacatgatgaaaccccatctctactgaaatgcaaaaaattggctgggtgtggtggcacacacctgtggtcccagctactcgggaggctgaggcatgagaaccaacttgaactggggaggcggaggttgcggtgagccgagatgcgccattgcactccagcctggggaacagagtgagactctgtctcc

SEQ ID NO: 4416 - DNA, 3384 bp, Homo sapiens
aacagatgaaaaaacactttctgtgtcagcactaatggataactgaaagcaagtcgacaaagatttggaaaatgaggcatacgtctaaaagaaaaccacaatattatgaggctgaaatggtactgaaatattacaaacacttggaggaaggcagtgtctcgctctgttgcccaggctggagtgcagtggcacaatcacggctcactgctgcctcaacctttggtgctcaagtgattcttctatttcagctttctgagcagctaagactacaggaactgaagctgcccaccttccgagcccactccccactcctgaagagccgccggttcttcgtggacatcctgaccctgctgagcagccactgccagctctgccctgcagcccggcacctggccgtctacctgctggaccacttcatggatcgctacaacgtcaccacctccaagcagctctacaccgtggccgtctcctgcctcctgcttgcaagtcggaacaaaggatcagggtccccagtgcccacacgttcagcgcagcagtgccgtcagacctgggccagaggcagcccctggtaagttcgaggatcgggaagaccacgtccccaagttggagcaaataaacagcacgaggatcctgagcagccagaacttcaccctcaccaagaaggagctgctgagcacggagctgctgctcctggaggccttcagctggaacctctgcctgcccacgcctgcccacttcctggactactacctcttggcctccgtcagccagaaggaccaccactgccacacctggcccaccacctgcccccgcaagaccaaagagtgcctcaaggagtatgcccattacttcctagaggtcaccctgcaagatcacatattctacaaattccagccttctgtggtcgctgcggcctgtgttggggcctccaggatttgcctgcagctttctccctactggaccagagacctgcagaggatctcaagctattccctggagcacctcagcacgtgtattgaaatcctgctggtcccccttttcagatgaaaaatcctaggccccagcggtcaatttggttgatatcagctagctaaggagtgaccccgctggggatggagctggcccagaattgcctggaaagcagagattgggctcattcaggccccaggaacactccagtgccaggggatgggaaggcattggtgagcacaagcaggcgccatcctcctggaagccagagtgtatgacaacgtcctcaaggatgccgtagccgtcaagagccaggccttggcaatggtgcccggcacaccccccacccccactcaagtgctgttccagccaccagcctacccggccctcggccagccagcgaccaccctggcacagttccagacccccgtgcaggacctatgcttggcctatcgggactccttgcaggcccaccgttcagggagcctgctctcggggagtacaggctcatccctccacaccccgtaccaaccgctgcagcccttggatatgtgtcccgtgcccgtccctgcatcccttagcatgcatatggccattgcagctgagcccaggcactgcctcgccaccacctatggaagcagctacttcagtgggagccacatgttccccaccggctgctttgacagataggccacctccagacctcacgaggaagccttggagatgtgggcagaggaagaggacactgaagaggagagctcagccaagtgaggcagcaggaggccatccctgaagagccttggaacgtggagggtctgtgctccttttaaataaaactgacccagagcaaaacattcaataacatacctcacccgagagcattcctctgagaaacgtctgccacgtgtggctagggtacaaaaggatggcttggtggccgtccccccacacaggggcccagtgaatcgagaaagacttgataagaggccaggagagtgggaactggacacagaccactgatctcaagcatgtccagtttttagcattaaagacttttctattctttgctgatggcagctacaccgctgaaaaaggaggggcagcctggcgtgttctcaggacccccggaggatcccatattgggtgcttttctttccctggctctatgcagaggggcctgagttggtgtgtatgcctgagtgtttgccttgcgaggcacagtgggtggctgtcttgcctttgttttcgaacctaaaaccattttcagccttttagatatgtcatgtgctgctgcttcccgaagtggtcttgctttctgtttcgtaagatgtcttgtttacacactgtatcagggatttggtgatacttgaaaattcctttggagaaaaaaacaaatttaattgccacactgcctgtcccacatgagggctgttaatttggaacccaagtttgaacccaacttgtgatggacccgcaggtaaccacagagcttcctttttgaaggcatatggttggagagaaccattttcccagctctcggttccggaagattccacgtcttggaggctgtgttcaccactagaactttaataactacccagggagggagaagctcgttgaaaggaagacaaagatttaaacagttcccacctctctccaccacatacttacagggcatgagtttaacccagtctaggctttgagtgtggctgatagcgaaggatagcaatgtggaaaatttgcttagtcccacctgtatttggggagtgggatgtacatgggcgtttgataccaccattgataggcaagcgactggttggatcaaaagccagtatttagggatctgcagcgagagggccctcaggaagactcttgtaaccatgtgcaatatgtttttattctgactcgcagcttgtgctcagcatgttctttggtttagtttggggttgggggacacattgttcacccagcagaactgggaggtgcaaaggaccgtggaagcaatttttgttttgtttgaggaatacctgtcttggattccttagccccttgccagtcctggagactgtggcaggggccgccaggaaggcagctgtctgctgctgagtcagatcggaaggtggtgaatctttccagagcagctgaaaatctcagcatggagacagtaagaaaagagacggggtgtggataagactctgccaccgtgtcacactagcataggaggctgcacgttcatttgttgttgtttttttttcctttgccaacctccgttctatttatgtgcaagcagtttggattcaagttcttgtatctgtctgttctgggacctggggattgtgagggttccctcacagccagcacgacccccagaaagaggcgtcccacaataaacacgtcacctgctcttgatctctc

SEQ ID NO: 4417 - DNA, 3757 bp, Homo sapiens
tagaaaacaatatgaagaggttcctcttaattaaaaatagaactaccagatgacaaaaaaattaaaaatagaattaccccagaactcctgcttccaggtatatatcaaaaaaaaaaaaaaaatggaaagcagggtcttgagatatttgcagactcatgttcatagcagcagtattcacaataacaaagaggtggaagcaacccacatgtccactgatggaaggataaatgtggcgtgtacatacaatggaatattattcagccttatgaaggaagaaagtgctgtcacatactacaacatggatgaactttgaggactttatgttaagtaaagacatagtgtattattccacttatctgaggtgtctaaagtcaaattcaggggctgggcatggtgcttcacgcctgtaatcccagcactttgggaggccaaggcaggcagatcacttgaggtcaggagttcgagaacagcctggccaatatggcaaaaccctgtctctactaaaaatagaaaaattagctgggcatggtggtgcacacctgtaatcccagctactcgggtagctgaggcatgagaattgcttgaacctgggaggcagaggttgcagtgagtcgagatcacgccactgcactccagcctggatgacagagcaagattgtcaaaacaaaaaataaaaataaagtcaacttcaaagaaacagtagaatgatggttaccagaggctgggggaaggaagctggaggaaggggagttttgtttaatgggtacagagtttcagttttgcaagataaaaaacttttggaggtcgggcatggtggctcgtgcctgtaatcccagcactttgggaggccaagtcgggcggatcatgagatcaggaattcaagaccagcctggccgatatggtaaaactccatctctactaaaaatacaaaaattagccaggcgtggtggtgggcgcctgtaatcccagctacttgggaggctgaggcaggagaatcacttggacccaggaggcagaggttgcagtgagccaagatcgcgccactgcactccagcctgggcgacagagcgagactccatctcaaaaaacaaacaaaaacttggagatctgtttcacatcaatatgaatatatgtaacactactgaactgtacacttaaaaatagttaagatggtaaattttatgtgttttttaccacaataaaaaccaaacaaaacaaggcatgatgattcatgcctgtaatcccagcactttaggagaccaaggtgggaggatcacttgagcccaagagttcaagaccagcctgggcagtgtggcaagacccaatctctcattaaataaataataataaccaaacaaaaaaataaccaccacttttcacactcaccatggcaaaatttaaaaacctaacaattccaagtgttgtcaaggctataggacaactgctggtgagagtgcaaattggtataaccactgtgaaaaaaaagtttggcattatgtatgaaacttgagcataacatatactttataagccagtaatacctctactacgtatatattcaacagaaatgcatacgtatgtgtaacaacatgtataaaaatgtttatagtggcatttctcgttatagccccaaactggataccacccacatgtccatcatcagtagaatggataaataaattgttgtgtatgcatgcaatgggactacactgcaacgaaaatgaatgaactgctgctacaggcaacctggatgaatctcacaaacatgatgttgagcgaaaggagccagacataaaagaatgcagactgtatgattccatttttgtgaagttcaaaaacaggcaaaaactaacctatggtgtcaggatagtggttacctttggggaggagggtgggtaatgggaaaaggggcacaaggggaggatcttttgaggtgctaataaggctttatctcttcacctggtggtggaaactcaagtgtgtctactttgtgagaactgggttgtgcacttaaaactggtgtgtctttatgtatgctgttcttcaataaaaaaaatttttttaatcacggtttatcaggattcagctgcccattagacacctttctgtgtctctctctctctctctttccagctcttcacagaggtcctccaggatcaaggggaccactgattccaccactgctgagtctcccacctcctccttggggtagaggcccaattcggagagggcttggccccaggtctagcccatatggtcgtggttggtggggagtcaatgcagaacctccttttccggggccaggccatgggggtcccaccaggggaagctttcacaaggaacagagaaaccctcgaaggctcaaaagctggtctcttatcaagaatacctgcccgcccaaggatgacccccaggttatggaagacaaatccgaccgccctgtctgccgacattttgccaaaaagggccactgtcgatatgaggacctttgtgccttctaccacccaggcgtcaatggacctcctctgtgagactgtgccttcccatccaggctggaaggagctctctgtgacctagcggccatttatttctctgtagccctatgatggctactgtgaggctcttctaacaccctcagtcagtgacacacccatcccatccaccacttcccccgtgtggggtccagagtggtgttgcatcactggtgcgcggcatacgcgctttcttctgatccagcctgtagagactcgccttcgggacccatctttgcttcctttcagttgcctcctggatcttctttcccgtcatcaaatgactgctgaacaggaaacctctttggtgctgtttcttgtgcatctgtccacctgttccccagtattgccctcaattcctgagagccctggagcggtttcctaccattcccttcttttagctgcttgttttaagtcctttttatgtgacattccctacccccaatgttgtcagctgcttgtgaaactcagccaggttgtctaacctggggtcaagtttgggtgactggtgcagagttacttcctaaaaggccactctccctgcctttggatttcatagtttctctgtcagtagcatgatccccaccgctatggtctatctatgatcaccgtgctttgtgaaactgtgcatccccttgtagcctttctcagtgtccgtggcatttttgtgacttcccagcactagaataagttttcctgccaaaatgagtgaggcgcttggtgccctctggactttcccacttcccaacatgggagaattgtgaactttccatcagactgcctccctggccctccccattcttctcctgttggttattctgagtctgacacagacccatgacatgtcttataaagcctccaatggctttatcctacctagatcctttccagcccattttaattagactatgtcattgtgaggccaccagtccattcatttgaattctgtgaatctccaccttgcctatctttgggtagaagctggacagtactgttgccctcttccaatcctcttcccctacatccctggcactggttgttttctgtgaaaacagcagtgaacaggttcagttttgaactggccctgaggaaatgggtcaggagttgtattggcaagagggaggggtgagagctgttggagaactgagaatgaggttttttttttttttttctttttaactttttttatattagtaataaatgcagtggaaaccagcattttattt

SEQ ID NO: 4418 - DNA, 4279 bp, Homo sapiens
ttttcatgaattaagtaattgccacctaaaaaataacagaagagagtatgaaaacaaaaaaaaatccatgtcttttaaaatgtcttttaccatgttgcttcttggcaagtatcttataaatattccaagtcagatgttaaaattttttaaagcagctttatatttccatagtgtaatattagtttgggatttattacagggctttaatgtctgtctttacttgtctagaagtagcttcactggctcctaactactgccctggggcagattcagatgaaatgtggtatgtagccacacccaatactgttggcatactttcattgaatctattcccatggaagaaacccagttgcaatttcagtattatttcatcaaagaggccaggccagagctatcataactactttcatgtcgtgtttcctttttattatatcatgttttatatcatatgtttgctttctacatactacatacacaattgcttgtgcttatataaatttataatgcttttgaataaacaaaacaataaatagtgatgggatcattttatacggatgtaatattttctgaagagccaaacaaattaaataagtaactttactccaaattttaatgagctattaaattttatttaaatcacttttcctttctacccaaaagtaatcatcttaagtgtttttccagtgtctgagaacattagtgggacatacaggtggagtatggtcatcacaaatgagagacaacatcatcattagtggatctacagatcggacactcaaagtgtggaatgcagagactggagaatgtatacacaccttatatgggcatacttccactgtgcgttgtatgcatcttcatgaaaaaagagttgttagcggttctcgagatgccactcttagggtttgggatattgagacaggccagtgtttacatgttttgatgggtcatgttgcagcagtccgctgtgttcaatatgatggcaggagggttgttagtggagcatatgattttatggtaaaggcgtgggatccagagactgaaacctgtctacacacgttgcaggggcatactaatagagtctattcattacaggtaagatctcttatctctcccttaaatgctctcctgatgaatcataaggttgttttactcagataatcactgtcaaattgctgatccagtacagtccaaaaaagattaatcagattattctgctgtttttatatacgttaaaattggcatgaagaaagtgtaaatttcaaaattatttaaatgctttcaattttctgtgatctatttctcctctaaatacaaatatttgttttgcaacctgacactttggggctctaagttttgctatgttaattaatggttaaatagtctcataggagagtaacctggattttaagaaactcctttgcagaagattaatatggccaaaagctgcccctttgctttgatagctgaaagttgatggaccatgtaattgtgattccatccccattcaaagtggaaatagatcctttctgcataaagcactctactgtcccaggcccactgatttgtagtcataaagaagtaaagttgactaaaccgatttcttttttttggtttatatttcaagcccatatccttgaaaacattgccatattttgagatcattaactagatgaataggaagtttagaatatgaatcttgttttatttccagaaaggcaacatttttaatgtaaaaatatttcctatagcttatatagtttatttaccagttattacccattaatgttcagcaaattagtacataatcttagtactgtcaattctgttcttaggatatttgtttctttgtcaaagggatattgtccatgtcatgaaatattgacaatatgataaaaatgtttgctaaattagaaaaggtgatgaatttggaggaaggggaattggctgcacctgtttctgatatgttcagaagcttaatgaatataatattctaatttaaataaactgtttgattgagaaaagaggtagccacattattgtttagaaatgatagactgttattgacttttggtgtagctgggaagctggagaagaggtagtatgtagtttgcttttgatttcaaaatgccacctcttctgattccagatacaattatcttttggcacatttcctaattagcattaggttcttataaatgaaattttattttacacacagtttttaatggaacttacttttgaacatcacgaaagttatctctagcccttttcatgccttaggtgctgataagcattccgtttatcataagctatgtcattagtctcagcttcctagtgggaagtaaaactcatagcaattctctcagtcatccatgatatatagctaggtggggccaggtgatttgaaaattaacatattgttcattttaggtgctttgttttcattttaagttgtttctgcatctagtttgaagctgcttggcataaagatgagcctttctgatagaagtgtgtgagaacatacattgtagagttgcttgatggcatgcactttatcctcattgccactttatcttagtacctcattttgttcctggcattacctgtttcccatcctcttccccctttcctactaggattaaggtcagtaattgataggaagagtatccatacttctattctaataaactgtgtcttttgtagtttgatggtatccatgtggtgagtggatctcttgatacatcaatccgtgtttgggatgtggagacagggaattgcattcacacgttaacagggcaccagtcgttaacaagtggaatggaactcaaagacaatattcttgtctctgggaatgcagattctacagttaaaatctgggatatcaaaacaggacagtgtttacaaacattgcaaggtaagtcttactcacctttcgttttgttcattaaaaatgagatcattattcaagagaaatatggagccttagcatcacaaaaagagtcaacctcatacagaatggttacttcagaaaagtttatgaatattttcaccctgacttacagaactagtctactcttgaggaaatgttttaaactgtgtttttaatatgtaatataaaattgtttaatcacttcctgcatgttcaattgactctacttaacctttaagaacagtgagaagaaagatcttggctatatcatagaagcaacgtactcattatattttttgattgaccattgcattttgaatttgtagtccaattttaaagggctaccttattgaaaaaaacaacagcatccttgatagaaaatttatttggcctccacttagtcacgtgcttaactggaatggagaggaataatagtgcctactaaagtagagaaagaaacaagtgaaaatcactaatattagatgaggtacagcagtgcctcatgattaactttttctatttgttatagcccttagaaagtgtttttttcagtggggccatctgataggcaacattgcagctttttactcattggttttgtctctcctcagagttttggaatagtgactgttcagctttgagtggttcatggtggtggggtaatagatctcttagtgctcatttgtccatcagcagaaggtatgaagttgcactatctacatcctcaccaaggaatgctgtcgttcacacagccagaaaataagatgtttgtctggtagctaaccaagcttcttggaagacagacctcttgaaagttaatgtttcagttacaaatcactaccagattttcttacatccatgctgatcctaaaatactgaggacatgggtttctaaatatgtatcatttcaaatgttgcatttattgtatgttctaaagtagaagtctacaaattatgatgtaactaactcatagccattatttctaaccagtaattaaattcttttggtttttgtctaggtcccaacaagcatcagagtgctgtgacctgtttacagttcaacaagaactttgtaattaccagctcagatgatggaactgtaaaactatgggacttgaaaacgggtgaatttattcgaaacctagtcacattggagagtggggggagtgggggagttgtgtggcggatcagagcctcaaacacaaagctggtgtgtgcagttgggagtcggaatgggactgaagaaaccaagctgctggtgctggactttgatgtggacatgaagtgaagagcagaaaagatgaatttgtccaattgtgtagacgatatactccctgcccttccccctgc

SEQ ID NO: 4419 - DNA, 1810 bp, Homo sapiens
gcactcccgctcctccgcccgaccgcgcgctcgccccgccgctcctgctgcagccccagggcccctcgccgccgccaccatggacgccatcaagaagaagatgcagatgctgaagctcgacaaggagaacgccttggatcgagctgagcaggcggaggccgacaagaaggcggcggaagacaggagcaagcagctcgaggaggacatcgcggccaaggagaagttgctgcgggtgtcggaggacgagcgggaccgggtgctggaggagctgcacaaggcggaggacagcctcctggccgccgaagaggccgccgccaagctggaagatgagctggtgtcactgcaaaagaaactcaagggcaccgaagatgaactggacaaatactctgaggctctcaaagatgcccaggagaagctggagctggcagagaaaaaggccaccgatgctgaagccgacgtagcttctctgaacagacgcatccagctggttgaggaagagttggatcgtgcccaggagcgtctggcaacagctttgcagaagctggaggaagctgagaaggcagcagatgagagtgagagaggcatgaaagtcattgagagtcgagcccaaaaagatgaagaaaaaatggaaattcaggagatccaactgaaagaggcaaagcacattgctgaagatgccgaccgcaaatatgaagaggtggcccgtaagctggtcatcattgagagcgacctggaacgtgcagaggagcgggctgagctctcagaaggcaaatgtgccgagcttgaagaagaattgaaaactgtgacgaacaacttgaagtcactggaggctcaggctgagaagtactcgcagaaggaagacagatatgaggaagagatcaaggtcctttccgacaagctgaaggaggctgagactcgggctgagtttgcggagaggtcagtaactaaattggagaaaagcattgatgacttagaagagaaagtggctcatgccaaagaagaaaaccttagtatgcatcagatgctggatcagactttactggagttaaacaacatgtgaaaacctccttagctgcgaccacattctttcattttgttttgttttgttttgttttgtttttaaacacctgcttaccccttaaatgcaatttatttacttttaccactgtcacagaaacatccacaagataccagctaggtcagggggtggggaaaacacatacaaaaaggcaagcccatgtcagggcgatcctggttcaaatgtgccatttcccgggttgatgctgccacactttgtagagagtttagcaacacagtgtgcttagtcagcgtaggaatcctcactaaagcaggagaagttccattcaaagtgccaatgatagagtcaacaggaaggttaatgttggaaacacaatcaggtgtggattggtgctactttgaacaaaaggtccccctgtggtcttttgttcaacattgtacaatgtagaactctgtccaacactaatttattttgtcttgagttttactacaagatgagactatggatcccgcatgcctgaattcactaaagccaagggtctgtaagccacgctgctcttctgagacttccattcctttctgattggcacacgtgcagctcatgacaatctgtaggataacaatcagtgtggatttccactcttttcagtccttcatgttaaagatttagacaccacatacaactggtaaaggacgttttcttgagagttttaactatatgtaaacattgtataatgatatggaataaaatgcacattgtaggacattttct

SEQ ID NO: 4420 - DNA, 2282 bp, Homo sapiens
cactcgctgcctcggcagcgcgctgctcttctaagatggctgccgctaccggtgcggtggcagcctcggccgcctcgggtcaggcggaaggtaaaaagatcaccgatctgcgggtcatcgatctgaagtccgagctgaagcggcggaacttagacatcaccggagtcaagaccgtgctcatctcccgactcaagcaggctattgaagaggaaggaggcgatccagataatattgaattaactgtttcaactggtactccaaacaagaaaccaactaaaggcaaaggtaaaaaacatgaagcagatgagttgagtggagatgcttctgtggaagatgatgcttttatcaaggatggtgaggaagaagaaaatgagaaagggagcctagctgaggctgatcacacagctcatgaagagatggaagctcatacgactgtgaaagaagctgaggatgacaacatctcggtcacaatccaggctgaagatgccatcactctggattttgatggtgatgacctcctagaaacaggtaaaaatgtgaaaattacagattctgaagcaagtaagccaaaagatgggcaggacgccattgcacagagcccggagaaggaaagcaaggattatgagatgaatgcgaaccataaagatggtaagaaggaagactgcgtgaagggtgaccctgtcgagaaggaagccagagaaagttctaagaaagcagaatctggagacaaagaaaaggatactttgaagaaagggccctcgtctactggggcctctggtcaagcaaagaggtttgtttttctatgtcagttctttacgatactgaattccagcattcaataagatcactctacattaagggggtggcttcaagaacatgtacagtaattagtgtcttatgatcctgcctataatatttttgaccgtcataagttacttttaaaaattttcaagatcttcataataatgcagtgtgttctactgattgcattgtcgaatgtcagcatatatttggtttttttgttgttttttgttttttgtttttttttttcaaattgacaatttttttgtgttttattttttaaaatccttgtgatgatggttaatgaacaactatcagttctaagaacacaaaatgaagtcaagtcccagtcctgaaatctggagaagatggccatatttccactgaatagaattgtcagaaaatctagatcttcaggcatcttggggaaaatcagtgcaagaatcctcagggagtcatttgttcaaataacctaatctaggcctttggaattgttaatttgtatgaatagcactagtttgaaatatagtaaatatcaagctgttctgttttgggtttgtttttgtttttgttttcaattttcttctggtgatttgcctctttagctcttcaaagggatctaaagacagcaagacatcatctaaagatgacaaaggtaaagtatttttttccctatttatttcagtgttgacattgtgtattttcattaaaaagtagtagttgcgcggtgttttctttgacatttagtccttaaaaattttattgacagactagaaacttgagatggtctttatataaactgtggaattatatatattacagaaaactgattgatgtgttactgtttacttactttgtaaactggtaatggggtacgttaaaaacccattagctagggaacacttacctggtgtgttctaagggactgtgttgaatattaatagatactttcttacattataatttcagaactattttatcttttgttactcatttataactactgtgtatcaccacaacctttttcctgttctgtctttaaataatacttgtgtgtatttgtggagtctagtgttcttttttctttttttttaaattcttgtaagtttcaaagtgcaatatttagttgctttctgatactgagaaatctctggttatctcatgcccatgagctgtagtttcatcttgtacatgtgctgtgtttacttgaaaaatacttaatttctagaaaaggattttaagggaaaataaaacattcaggtactgcaaagcttttaaatacctcctaaatgtgtaaaggagaattgtatgcatcctccatagtttattttaaatcgttagaaatcataaggatgtgatttatgaattggttggtcttgcttaaaagaatgtgaaatatagaaattgttccttttaattgcttgtatactgtttctcttaaagtgagtaaaaattattttccaaataaagtcaagtgaatg

SEQ ID NO: 4421 - DNA, 2319 bp, Homo sapiens
gtaatacaatgttaaaacagattaaaaattgagatagaaaaactgctcaatttatgcttcacataaaattgaaaattaaatcaagcctacacataaaggcattttttatatatatacacacacacacacatactttttatgttatttttggagagaatcttgctctgctgcccaggctggagtgcagtggcatgatcatggctcactgcagccttgaccacccccagggttcaagtgatcgtgccacctcggcctgctgggtagctgggactacagacaggcaccctgcctggctaatttttgcattttttgtggacacagggttttgccgtgttgcccaggctggtctcaatctcctcggctcaagtcaacagcctgcctctgcctcccaatgtgttgggattacaggaataaactactatgcccaactcaagattattttttaaatggtttattttcttagtaaattggggtgcacaagtcattaaaagcaaggattaaatttaaagggaaaaatttgttttacttttctacagaaaattaaaaccaaagcacattaaaagtgacaacacggccgggcacagtgactcacacctgtaatcccagcactttgagaggatgaggtgggcggatcacaaggtcaggagatcgagaccatcctggctaacacggtgaaaccccatctctactaaagataccgaaagttagccaggtgtggtggcgcgcgcctgttgtcccagctactcaggaggctgaggcaggagaatggcatgaacccaggaggcggagtttgcagtgagccaagatcaggccactgcactccagcctgggcgacagagcgagattctgtctcaaaaaaacaaaaaagcaacaacccaagatggaaatgacaaaagttacttaaaatgtgcaacataaaaggtagtcatttaggctgggtgcagtggttcatgcctgtaatcccactttgggaggccaggacaggtgggtcacttgaggacaggagttcgagaccagtcaggccaataccgtgaaacagtctctactaaaaatccaaggattagccggatgtggtatcatgcacctgtaatcccagatgttcgggaggctgaggcatgagaatcgcttgaatgcaggagcagaggttgcagtaggctgtgatcatgccattgccctccagcctgggcaacagagctagatccttgtcttaaaaaaaaaaaaaaaaggaaaggagtcatctataattttactacttatacagattacattgagataaatcgcaaaatattaggcaaaactttaaaacaatttttaactatccagtatatcaaagagagatgccacacattgtatttgtttgcaagaatgtcattgtgattacaaaactgaccactaaccattcagttgaagttgattgagaacttaaaactatttccgtctatggccataccaccctgaacgcgcctgatctcgtctgatctcggaagctaagcagggtcgggcctggttactacttggatgggagaacttaaaactatttccttttttttttttttttgagatggagcctgggtgacaagagcaagactccgtctcaaaataaataaataaaaataaaaaataaacatgatgatcacagatgcagtcacattttctgagttcttgtctctctgccagtgccacccagatagcctcacaaaactttgacccagccactgttagtgtcgccaccgcccataaaggagctgagcccagcaggggcactgcctggggccctgtagccaaaaggctacagcaggagctgatgaccctcatgatgcctggtgacaaaagaatttctgcctaccctgaaagccttatcaaatggacaccatccatgaagcagctggcacagtgtatgaagatctgaggtataagctcttgctggagttcctcaatgactacccacctttacgatgcacccacagtgaagttcctcacaccctgctaccaccctaacgtggacacccagggtaacatatgcctggacatcctgaaggagaagtggtctgccccgtatgatatcaggaccatcctgctctctatccagtgcctgctaggacaactcaacattgatagccctttgaacacacatgctaccaagctctgggaaaaccccatagctttaagaagtacctgcaagggtcaggcgcagtggctcacacctgtaatcccagcactttgggaggccgaggtgggtggatggatcacctgacgtagagagtccaaggcctgacaaacatggagaaatgtcatccctatttaaaaaaaaaaaaaaag

SEQ ID NO: 4422 - DNA, 2500 bp, Homo sapiens
aattctcagtgctgctttattttcctcatgaaaataaagaaacttagaatgtgcacttagagtaatatatgagaaactgatttttaattaattaaaataatataaggactggctttttgtggatagttttcaagttgctacagattaaatattattcaagaagcattttaaaaaattatctgcatcaaaatacttttttagtttaatgttctccaaactttgaataccgtttctagggtgaagataaaatgaaggagagaaagaggcatttgggagacacaaaacacttttgtccggtggtcctcaaagaaaacttcatcctgcaaccaggaaacacagaagaagcagccaagtatcgagaaaagatctactacttttcaagtgctgaggctaaagaaaagtttttggagcatcctgaggattatgtggctcatgaagaaccattgaaggctcctccattaagaatatgccttgtcggcccccagggctctggcaaaactatgtgtggaagacagttggcagaaaaattaaacatttttcacattcagtttgaagaagttcttcaagaaaaactactactcaaaactgaaaagaaagtgggacctgaatttgaggaagattctgagaacgagcaagctgccaaacaagaacttgaagagcttgcaattcaggccaatgtcaaagttgaggaagaaaatacaaaaaagcagcttccagaagtacaacttacagaagaagaagaagtaatcaaatcaagtctaatggaaaatgagcccttgcctcctgaaattcttgaagtaattctttctgagtggtggcttaaggaaccaatacgttccacaggttttatattagatggtttcccacgatatccagaagaggcccagtttttgggagatcgtggatttttcccagatgcagctgtttttatacaagttgatgatcaagatatttttgatcgcctccttcctgcccaaattgaaaagtggaaactaaaacaaaagaagaaattagaaaggaagaaactgatcaaagacatgaaggcaaaaatcagggttgatacgattgctaaaagaagggctgaacttatattagagagagataaaaaaaggagggaggtaagtagttttgttttttttttcaaaacagggtctcactctgttgcccagggcagggtacagtggcacaatcatagctcactgcaacctcgaactcctgggctcaagggatcctcccacctcagcctctcaaagtgctaggattacaggcatgagccatcacacccagcctttgccttctggcttaagacactcttgtaacagcttttcaaggctgaccctcttgtaacctgatttccatctgtataaaaatgtccagccaaacaaggagaagagaaaaagaggaatatcagaaaatacaacttgctacaagtgcaaccacatgtcaccctggtgtgaatatgctggacttccgtacagaggactgctgatattgtacagtgcaactgcaactgcaactgcaggcacaaagcattgcagaagcggggccaaagtaattgttgctttgtcaaaacaaaatattcacaaccaaaagtagataagaaaaaaccattggactgagaaaattatggcaccatgtaagaataagaaccctcctcttaattatttgcctcgattttcattcatttattcattcagtccatcagcaaacattaattgagctttgtgtctgacactgtttcaaatactggcaaatcagccatgagcaaaacttacagaaatcgtagcctcattataatgctcatttctctcatcaaacatgttctgaaagtttgctctgtttaaggtgtcatgctaatgtttaggatcaaaaagatgtcctaacctggaattaagtacagttaactactttaagcccttgggagtccctagtggtccccttctgaatcacttcaaatgtttcagcagtgaaggagtccaggctttgcagttaaacacacctacgcagtatcccttctccagttctcactgactttgttcactgctctccagtgcctggtggagtgctgacacatgtgacattcaacttcagttgtttcgctgaggttgtataacattgagtaagtcacttagcctctgtaaacctagggctttttattgtaaaatgggaaaaattaatacatttagtttccctaattaataataatttaatttccctttgctactcttcagttaaatcttcttttcttaagaattaattttcaggataaactttaaatgttctttataattttttcatttgttaacattagaatggtgtgatttcttctgatttttcattcggaaattcaatattctatgtagaggttaaataggattttgtaagtcagctctcctgagacttcatgtttgtaaaactgtctgtgtatcccacaaaactgatacaaacaaactcgcagcacaactcctgagatgtttgatgaataaaaaattaaaactgt

SEQ ID NO: 4423 - DNA, 2311 bp, Homo sapiens
gtaggcggcaagaggcctcggcacccgcgaactcataaataccggggcggcgctggtggcgggagaggcgcgtgcgggcagccggcgcccccgaggcacctggataaccacccatcttgaaggagacctccctgccctgcctctgttgtcccccagagcactgcctgatcatcctctgttccccatcctcccagcccttcctgctgtacctgtggggagctgatctcctcagtccccctgcttttccccggtctgccatcaccaccccaccaccatgcacccccttcctggctactggtcctgttactgtctactcctgctattctccttgggagtccaggggtccctgggggctcccagcgctgccccagagcaagtccatctgtcttacccaggtgagccaggctccatgactgtaacttggaccacatgggtcccaacccgctctgaagtgcaattcgggttgcagccgtcggggcccctgcccctccgcgcccagggcaccttcgtcccctttgtggacgggggcattctccggcggaagctctacatacaccgagtcacgcttcgcaagctgctgccaggggttcagtatgtttatcgctgtggcagtgcgcagggctggagccgtcggttccgcttcagggccctcaagaatggggcccactggagtccccgtctggctgtgtttggagacctgggggctgacaacccgaaggccgtcccccggctgcgcagggacacccagcagggcatgtatgacgccgttctccatgtgggagactttgcctacaacctggatcaggacaacgcccgtgttggggataggttcatgcggctcattgaacccgtggctgccagcctgccgtacatgacatgccctgggaatcatgaagaacgctacaacttctctaactacaaggctcgcttcagcatgccgggggataatgagggcctgtggtacagctgggatctgggtcccgcccacatcatctccttctccaccgaggtctatttctttctccattatggccgccacttggtacagaggcagtttcgctggctggagagcgacctccagaaagccaataagaaccgggcagcccggccgtggatcatcactatggggcaccggcccatgtactgctccaacgcagatctggacgactgcacacgacatgaaagcaaggtccgcaaaggcctccaaggcaagctgtacgggttggaggatcttttctacaaatatggagtggatctgcagctgtgggctcatgagcactcgtatgaacgactgtggccaatttacaactaccaggtatttaacggcagccgagagatgccctacactaacccgcgagggcctgtccacatcatcacaggatctgctggctgtgaggagcggctgacgccctttgctgtcttcccgaggccctggagtgccgtgcgtgtgaaggagtacgggtatacgcggctgcacatcctcaacgggacccacacccacatccagcaggtgtcggacgaccaggatgggaagatcgtagatgatgtctgggtggtgagacccctgtttggccggaggatgtacctctagggatggcggcagctctcctccagaagcctaggttttgccgccttggctgctgtgaccagaaactgcccaggcctgggtggggagttgggtgggccctgactcccctgccctccagaggccccatgtagggtacatgcagccctatggagctggggcagctgttccctcctggagaggtgggagtcctggctggctgtggagggagggcaggtgtgcgggcacagagtgacacacggcaggtttctgctggcagggccccaccctcctgcatagctctgatcgggcgaggtgcccacggggcttcaggaatgaagaggcttaagctctggctccatggattctgcacatctgcgggggatgccgctgggcttcctcctctcctgcccacctggcaagggcatcgccaggtgggcacaaccgtcatgacactactcaccagcaggtggcgtcaggggctttttcttctgagcccggcactgagagttggtctgaagcctggctccttcttcactgctccaggactgctatgaagagtcccttcatgcctcagtttcccagcctggcaccatcttattcgggaagaggagacgtgttaacactcttgcctcctagctaggacagatgacaaaccgcaagagccacagacttgccagttccttccctctttccttcctttctttcccttcttttatttattgaatcataatttattgagcatct

SEQ ID NO: 4424 - DNA, 2976 bp, Homo sapiens
aaatcctgggactgctgtgcaaggcagagtcactagggacggactctggcagcagagctgcgctctcgtgccccagccagccaggctctcctgggtgagtagcagggagacccctggaacttacggggatagaaggagtgtgatgccaggagccaggggaggaaaatgcctggcagagacgagggagaggaggagacacatggagccgttcatggatttcacacaggatctgggctggaaggggctgccgagaccatcagtccaatctttggtctacaggttgggaaactgaggctcaaggaaggctctgcgtcctgctttgtgtaaggagagagctgggcagtgaggccgaaagtccttcctgagctcacagtccaagtcgcaaggaatcacatcatttccaagtacccatggcagaagagggagccatcctcaaggtcaccaaagacctaagagctgccgtctctgccatcctccagggctatggggatgggcaggggccagtgacggacaccagtgccgagctgcacagactctgtggctgcctggagctgctgctgcagtttgaccagaaagagcagaagagcttcctggggcctcggaaggattactgggactttctctgcactgccctacgacggcagcggggaaacatggagccaatccactttgtccgttcccaggacaagttgaagacccctctggggaaaggccgtgccttcatccgcttctgcctggcccgtgggcagctggctgaggccctgcagctttgcctcctgaactcagagctcaccagggaatggtatggaccccggagccctctgctctgcccagaacgccaagaagacatcctggactctctctatgctctcaatggggtggccttcgagttggacctccagcagccagacctggatggagcctggcccatgttctcagagtcacgctgctccagttccacccaaacccagggaaggagacccagaaaaaacaaagatgccccaaagaaggtgcctctgccctgccttcactctgagttgcctcttccccatctccttggcatcctcaagatcccagccgcatatggagggcctgaaaatgtccagattgaggactcacacaccagtcaagccatctgtctgcaagatgcacccagtggacagcagctggcagggcttcccaggtcccagcaacaaaggcatcttcctttctttttggaaaagaagggggaaagttccaggaaacataggtacccccagagcatgtgggagccagaagggaaggagcttcagctagaccaggaggaaagagccccatggattgagatcttcctggggaactcaacacccagcacccagggacaggggaagggggctatgggcactcagaaggaggtgatagggatggaggctgaggtcacaggggttctgctggttgcagagggtcagagaacaacagaggggactcacaaaaaggaagcagagtggagtcacgtccagaggctgctgatgcccagccccagaggggctgtagagggagcagtatcagggagcaggcaggggtcggggggctctagcatcctgggggagccctgggtccttcagggacacgcaacaaaggaagactctaccgtggagaatccacaagtgcaaacagaagtgacccttgtggccagaagggaggagcaagccgaggtgtccctgcaggacgagatcaagagcctcagacttgggctccggaaggctgaggagcaggcccagcgccaggagcagctgctgagggagcaggagggggagctgcaggcacttcgggagcagctcagcaggtgtcaggaagagagagccgagctgcaggcacagctggagcagaagcaacaggaggctgagaggagggatgccatgtaccaggaggagcttggagggcagcgggacttggtccaggccatgaagaggcgggtgttggaactgatccaagagaaggaccgcctgtggcagaggctccagcatctctcttccatggctcccgagtgctgtgtggcctgtagcaagatctttggccgattttctcggcggtatccatgcagtgctaggaccagccttgggagagaggaaagtgagccaccaggagaagctgccatgtggaggtggaggctctggaggggtcgggcatcaggacacccttcaggagaggggagacctcctgagacaaaccaagggcattccactgggagatgagaaacagatgtctcaggtggacctgaagatgctggaactccatgacctcagcgcccacttggggaagtgccagctgcagaggccgccccaggctttcctgcctctgccttccaggctctgtggaggcctgctctgccatgcttgctccatggattacaagaagagagaccgctgctgcccaccctgcgcccagggaagagaagcccaggtcacctgaccaagaccaagaccagcccatgactggcctcccacctgcctgcccatcccactcaatccactccctgcccgtagctcttcccagccctcttgtttgtccagtcctcattctagacactgaagatctaaggcaccagcacttctgtgggcagagtagggtgtggggagtggttccagccctgcaactaccacaacgagccaggtgactttggcgaagctctcagtgctcagggcttcttctctaatgttaagagttgggccccatcctctctaaagtccctctgggctcagcaaatccatgactgtggataagaccccagcagccctgacatttctcctccacactccccactcacccagcagcggtgccacctttcctgattcacgagaagtgaagcctgcactatcttggactctccagcagcttcctgtctggagtcagcttcagggatctgtgtttgtgttgctgtgtttctttttatgtttattgaagtactactgacatatgataaacatcacagagtgt

SEQ ID NO: 4425 - DNA, 2142 bp, Homo sapiens
taactctccaaactcccatgagctgtaacctagcttccctatgcagcaaagttcttgaacaaggtgcttaccatcctatcctcattccctcacccctctctcctccctggacccactgtgcccaacatctgcgcccttgtacctgcaaaggctcatctcactatggggaccaacaacctcgctcacaagtgttaaactccaagatgctcctttctgcttctgtccttgacctttccagtgttgacagtgatgcctttgaaatcctcctctccttggcttccatagcaatacgcactcctagagtttgtcaccctcttttgcccctccacttcattcttcttcacaagggccagccttcacatgttgaggttctttgggatgctgcctggctgttcttcattgtggacttgatgttttcctctatcctgttgtgcacattcttacggcttcaatactttgtctaagctgttgatttcaaagttggcatttcatcccagctctctcctgagtttcagactgccttttcaaaagcctactgggcatctctatccagtggtcacccaggcacatcaactcattccaaactggtgactctccaggtatttctatctcacccaccccaagatgctcaagcagaacacctggcatctccttgggtcatcttttccccatctttatacttattctccatctaatcccatctacccattacatgttttttaaatccatccacctcttttcaaccccactgctcattccctacatcattaacatctttctcgtagactcctgacctccctccaaattcttgctgtggtctgaagaatttttctaaagtgtaaatctggccaagtcagtcccctgtgtaaggctctttcatggtttctcattgcttttaggataagttcaagtccttatcaaggatcttaagacctaccttgcctggccccaggttaccctccccaacctaactcataccactcccaaacacatattccaagttctgaccatacagcactgttttcaaatccttgaacaagccaagggtgacttgcctctggggctttttcctgccattcttcttcctggaacactttctcagaatcctgtttctccactaattcctatttgtctttctgatgctactccacaggtcccctcctccaggaagccctccgtgttctcccaggctagatgagagcccctcctctgtatcctatatttcttgggcacacaataattctgtacatttgaagctcattctactctttctacttcctctgtcccagcacttagtacaggtgattgtagcagcctctttatgggtcagagccgcctacaggaccagaagcttcatgaagccagcaccccaacttccaacaccagcgtccgcaatgcccaacagagatcccaggtgaggaagctgaactgactttggtgacatatattccccaagatctgacagctgatgagtgacagagcacgtattcaaacccagagatgtgaattcgctatgctgcctaggctggtcttgaactcctgacttcaagtaatcctcccaccttcgcttgccaaagtgctgggattataggcgtgaactactgctcccagctgagagctcacttttgtttgctagtggtgttcttagtatcttttcatatttgaggttttggtggtagtgctgaagtattgtactcaccatccaaggtttacaggacttttgttttactatggaacagatggaattgtttagttctgcatctttgcaaatatacaaaatgtgcctaccaggactctgctttatatccattgaaagcaagaagtaatacagtaaaactttgcctggctagaggctttgaaagaatggactattctgatttaattgtattaacttggaagtatgaaggtgaaaaaaattaaaaacttaaatttcctgttgaatgcaatttgaaaatatagccattgattccacttttattctccagtaagtctggacattctgatatacctggtgttttattatagaactcctagtgtgcctgaagatcattttctacaactttaggtgtaagaggatgtaaatggtattgtatgagatcaggctggatgagaactgatacttgtaaatacactttttagact

SEQ ID NO: 4426 - DNA, 3466 bp, Homo sapiens
agtgctggtggcagggagctccgcggacagacttgcaagagacccctgctccttgttggaaagttgtcccatgatgaaggcctagacctggtcacggagacttttggatgcagcctttaacgaaggacgcaggcatgagcctgtcctctgtgacgctggccagcgccctacaggtcaggggtgaagctctgtctgaggaggaaatctggtccctcctgttcctggccgctgagcagctcctggaagacctccgcaacgattcctcggactatgtggtttgcccctggtcagccctgctttctgcagctggaagcctttctttccaaggccgtgtttctcatatagaggctgctcctttcaaggcccctgaactgctacagggacagagtgaggatgagcagcctgatgcatctcagatgcatgtctattctttaggaatgaccctctactggtcagcagggtttcatgttccgccacatcagcccctgcagctctgcgagcccctgcactccatcctgctgaccatgtgtgaagaccagcctcacaggcggtgcacgttgcagtcggttctggaagcttgtcgggttcatgagaaagaagtgtctgtctacccagcccctgctggtctccacatcagaaggctggttggcttggttctgggtaccatttctgaggtggagaaaagagttgtggaggaaagctcctctgtgcagcagaacagaagctacctgctcaggaagaggctgcgtgggacaagcagcgagagcccagcggcacaggccccggagtgtctgcatccttgcagagtttcagaaagaagcacggagacccagagctcaccagagccccattggagcaccttgacacacagtcactgcagcctccttgttaaccgcgctcttccaggagcagatccccaggaccagcaggcgggccggaggctcagctctggatctgtgcactcggcagcagacagctcatggccaacaactccttctcagaggggttttctgcaaagaaggagcaagttttccaggccagagttcatcctgttggctggagaggccccgatgacactacatctgccgggatcggttgtgaccaaaaaagggaaatcctatttggctctcagggacctctgtgtggtcctgctgaacgggcagcacctggaggtaaaatgtgatgttgaatcaacagtgggagctgtcttcaatgccgtgacatcctttgccaacctcgaggaactcacctactttggcttggcgtatatgaaaagtggagagtaagccatactttcacgttgaagattacatcccagcgagtctgatcgagaggatgaccgctctacgggtccaggttgaagtctcagagatgcaccggctcagctctgcactgtggggagaggatgctgggctgaagttcttgagggtcactcagcagctcccagaatacggtgtgctggttcaccaagtattctcagagaagaggaggccagaagaggagatggccctggggatctgtgccaagggtgtcatagtctatgaagtgaaaaacaacagcagaattgcaatgttacggtttcagtggagagaaaccgggaagatttctacttatcaaaaaaagttcaccatcacaagcagtgtcactgggaagaagcacacatttgtcacagattcagccaagaccagtaaatacttactggacctctgctcagcccagcatgggtttaatgcacagatgggctctgggcagccttcccatgttttatttgaccatgataagtttgtgcaaatggccaatttgagtcctgcacaccaggcccggtctaagcctctcatttggattcagagattgtcatgctcagaaaacgagttgtttgtatccaggcttcagggtgctgcaggaggcctgctgagtacatcaatggataacttcaacgtggacggcagcaaggaggctggagcagaaggcatcgggcgcagcccctgcactggccgggagcagctgaagagtgcctgtgtgatccagaagccaatgacctgggactctctctctggaccacctgttcagagcatgcatgcaggctcaaagaataataggaggaagagctttatagctgaaccgggccgagaaattgtacgtgtgacactgaaacgtgacccacatcgtggttttgggtttgtcattaatgagggagagtattcaggccaagctgaccctggcatttttatatcttctattatacctggaggaccagcagaaaaagcaaaaacgatcaaaccaggagggcagatactagccctgaatcacatcagtctggagggcttcacattcaacatggctgttaggatgatccagaattcccctgacaacatagaattaattatttctcagtcaaaaggtgttggtggaaataacccagatgaagaaaagaatagcacagccaattctggggtctcctctacagacatcctgagcttcgggtaccagggaagtttgttgtcacacacacaagaccaggacagaaatactgaagaactagacatggctggggtgcagagcttagtgcccaggctgagacatcagctttcctttctgccgttaaagggtgctggttcttcttgtcctccatcacctccagaaatcagtgctggtgaaatctactttgtggaactggttaaagaagatgggacacttggattcagtgtaactgtaagagtttttaggagagcttgaaaagcagttaacaagatgtccgtctagaacctggtggccattccacccagatggcaacctctgacagtgtgcttagtttgcacaaatgtaaggggtaaataaaaaagccagtgggggcctgcactgggggatgagttcagagacaaacagaggtactggggaacctcaggatgagcagggcatgcactaggggactccaaactcatgaggaggcagtgtgggcagagttggctgatgtgtcctgactctgaggtcaagctggactgcagagagagagaagcacattggggcttcagggacacaagctaaaggtaagaagggcagtccactgtcatctggccaaggacgggtggggcagtccactgtcatccagcatagaatcagtgtggagcctcttgctcagacatcccagggccaggcctccatcaggactgacactttccatttggtttctgagctctgcctggtagacccttgtgaaaggagattacccatataactgtgtttacccaaggggttggggaatggcacacacaaagctggtgaaaatccagaggtcagaggttggaaggtgctgcttttattactgagtattgaaagtgatccattacaggctgggctcggtggctcatgactgtaatcccagaactttgggaggccgaggcgggtggatcgcaaggtcaggagattgagactatcctggctaacatggtgaaaccccatctctact

SEQ ID NO: 4427 - DNA, 3008 bp, Homo sapiens
acagagccgaccatctcccactcgagctgcccccgccctctggacccgagtgactcaggcctttgtttgtccttcctggtagaggcgggttccctccctcggcaagatgccggagtgctgggatggggaacatgacatcgagacaccctacggccttctgcatgtagtgatccggggctcccccaaagggaaccgcccagccatcctcacctaccatgatgtgggcctcaaccgtaagtgcagcccagcctcagtcagccctcctctgcctcccatcagccagagcgacaaactatgcttcaacaccttcttcaacttcgaggacatgcaggagatcaccaagcactttgtggtgtgtcacgtggatgcccctggacaacaggtgggggcgtcgcagtttcctcaggggtaccagttcccctccatggagcagctggctgccatgctccccagcgtggtgcagcatttcgggttcaagtatgtgattggcatcggagtgggcgccggagcctatgtgctggccaagtttgcactcatcttccccgacctggtggaggggctggtgctggtgaacatcgaccccaatggcaaaggctggatagactgggctgccaccaagctctccggcctaactagcactttacccgacacggtgctctcccacctcttcagccaggaggagctggtgaacaacacagagttggtgcagagctaccggcagcagattgggaacgtggtgaaccaggccaacctgcagctcttctggaacatgtacaacagccgcagagacctggacattaaccggcctggaacggtgcccaatgccaagacgctccgctgccccgtgatgctggtggttggggataatgcacccgctgaggacggggtggtggagtgcaactccaaactggacccgaccactacgaccttcctgaagatggcagactctggagggctgccccaggtcacacagccagggaagctgactgaagccttcaaatacttcctgcaaggcatgggctacatgccctcagccagcatgacccgcctggcacgctcccgcactgcatccctcaccagtgccagctcggtggatggcagccgcccacaggcctgcacccactcggagagcagcgaggggctgggccaggtcaaccacaccatggaggtgtcctgttgaagcccttgatcccgctgacgacgcccacgtcgaggccccaccgccatccttgcgccggctcatgttccctttagtttatttttgtgagggcaaaggggaggaaatggggttctgtttgaaaaaaatgaggggatcttagatgctgcagcagaacagtctccaggtgttttaaggggctcagtcctcctcatcccatctcactctccgtggtaacttagccaacttgacccctctcatcccactcccggcggcccaggcacagaagggcagggccatagggagggagattcgctacggatccaggccattcctgggtgagcccttgggcaggcatgtttggagatgagagaggcttcgagagggtgggtgctgggccacaggggtgcggggccagctcaggcactggcgtgggagccctgggagaccccttcccccaccctccaccaagcacacctgtttctgtctcatagcacatgtgacaatcatctggacaacagccacaagggggcgctcggaccaggcagccactttcctggtgctctctgggcccagctggtgctgtagggccacgcaggcaggggcgtcaaggggtttctctgcccaaggaagacagaacatggagaaccgtcagggcaggaaccccacagactgtcccttccagcccacactctgccacctcctggccctgtcccaattctgagccaaggcctccccgaggcagaagttgcctggtcctctgtccccacagtgacctgactgggggtgagggagaaggaggagagagcccatgtgtggtgtgtgtgcccctgagaacttcgtggtgactgcctttgggagcccgcaggtggccagaggcaggggtagctgagttcctggagaccccttttttgcccccaggttccccagagggcaacgccatcagtagcagtgtggtgtttcaggcagagctctggccaggctgtgccagtgtgtcccggacgcatcactaaggaagagagagtttatttagtcaactggcccaaggcagcgaggcttctacagtcccacaccccatagccgcctgggctggggcttactgggggctgaaggttctggacatgaacaagggtcaggtagaagagaaaggcttcccctacaccccagcctcctgctgtcccctgaagcccaggactgcgttgtatgctttccatccactcaccttaccccatagcatcttgcggcccagaaaccagagccatttgtctcagaccctaaatcaataatcacaaaccccaaaacgggagagagcagtgaaaacatgcagggctgtggacgggggaagggttgtggcgggtgttctgaggctgagaggacacctatatgcgtatttcctctacacacatcaccccccttctataatcttaagccatgactagcctggtggcgtgttagtttctgcccagttctaccccctcatgtgcttcttctgaatactgaatgtgactgtttgaaagctggtagaattcatccctcttactgtagataacactgcaaatcttggaattttgttttttgctgtttccagatgtatctataaatatctatacattatatgtgtgtgtgtgtgtgtgtgtgtacatcgggtcctcccatgtgtggtgttcttctggaggttgtctctttggtcaaggtgaacttttaatgtttattattttcttctccgcacaaagtaaagagcctaattttgtgtattctggtggctgctgtcatgagatgataaaatgtaaaacaaaactctagtcaacgtagaaagagttaactgtgctgaaaaactaataaagaacctaag

SEQ ID NO: 4428 - DNA, 2744 bp, Homo sapiens
ttagattttcagagacccatcttcaatactttgaactcattctggtaaacttccttctacctatgtgcaggtccctgtactccagccaacacaggctcagtaactggaaatgaattggctaaaatggtagcaccattgggtttcttaatggagctttaggagttctttatggaaaaaagcacagaactaaattcctcaaaaaacaaacaaacaaacaaaaccacacacacaaaaaaacaaaactcccatgtcttgatcttaatgattgtgagcaaggatggtaaaaagctctgctggctgacccctaagaccttgaatggtaagctacaatacagatatcacagtcccttacagattgttcgaaaactcgttggatcataattaacattgttagaactctcatacattacatctgatcctaaaacaatactatgtgataggtagtattgcccaagttacagtgatgaggttgaggtttaaaggttacatgacttgtttagggtcataatactgaatctgaacccagatctgccttgaatatattattcttcccaagttaccacacattgaagaagacagtgttcatccttttcctacacccactgcttagaaattttgtcgtgggctgggcgcagtggcttcacgcctgtatcccagcactttgggaggccgaggtgggcggatcacatggtcaggggtttgggaccagcctggccggtatgttgagactttgactctactaagaatgcaaaaattggctggacgtggtggcatgcgcctgtggtcccggctacttgggaggctgaaccagaggaatcgcttgggcccgggaggcggaggttgcagtgagctgagatcgtgccgctgtgctccagcctgggcaacacagcgagtctctgtcttccaaaagaaaaaaaaaatctgtcacttatttaaaaagttaactatattttaaaagccccaggcttttcatatgctgcattttttggtgttgtatatcagatactgttctgcttgtaaagacaatacagttttccatattttacaaaagaagaaatgggagaaaggggtttaagtaacttgccctagtcacacagtaaggagaagcctgctacccaaacttctggcttgagtactcaaccacttactttctgtgctttatttccccttacgtggcagcaccattctgcagaaaacttccaagcagtttttttcacttaaaaattaaaaccctgtttactgccacctcttgactctttgccatgtgttgggctgtacatttgcttctaataaagataattggtctgttctttttctctttgaatcgggtcttgctcttttgccaggctggagtacagtggcatcgcagtcatggctcacgacagcctcaaactcctatgctgaagccatcttcctccctcagtctctcaggcagctgagactatgggtgtgtatcaccatgcccagctggggtgcagtggtgcggtctcgctcgctgcaacctgcatctcccgggttcaagcgattctcctacgtcagcctcctgagtagctgggactaagggcgcatgtccccgggcccgactaatttttttgtatttttactagagatgggatttcaccatgctggccgggttggtcccgaactcctgacctcaggtgatccgctagcctcggcctcccagagtgctgggattacagaaactgaaggctcggaagaggatgataaagaaaatgataagactgaagaaatgccaaatgattcagtccttgaaaacaagtctcttcaagaaaatgaggaggaggagattgggaacctagagcttgcctgggatatgccggatttagcaaagatcatttttaaaaggcaagaaacaaaagaagcacagctttatgctgcccaggcacatcttaaactcggagaagttagtgttgaatctgaaaactatgtgcaagctgtggaggagttccagtcctgccttaacctgcaggaacagtacctggaagcccacgaccgtctccttgcagagacccactaccagctgggcttggcttatgggtacaactctcagtatgatgaggcagtggcacagttcagcaaatctattgaagtcattgagaacagaatggctgtactaaacgagcaggtgaaggaggctgaaggatcgtctgctgaatacaagaaagaaattgaggaactaaaggaactgctacccgaaattagagagaagatagaagatgcaaaggagtctcagcgtagtgggaatgtagctgaactggctctgaaagctactctggtggagagttctacttcaggtttcactcctggtggaggaggctcttcagtctccatgattgccagtagaaagccaacagacggtgcttcctcatcaaattgtgtgactgatatttcccaccttgtcagaaagaagaggaaaccagaggaagagagtccccggaaagatgatgcaaagaaagccaaacaagagccggaggtgaacggaggcagtggggatgctgtccccagtggaaatgaagtttcggaaaacatggaggaggaggctgagaatcaggctgaaagccgggcagcagtggaggggacagtggaggctggagctacagttgaaagcactgcatgttaagagggggcacagccctcctcccaagggaaagtgtttttgtatataatgtattttttcacttttggaggattctttttgtataacttcaataaagattgtaagc

SEQ ID NO: 4429 - DNA, 2359 bp, Homo sapiens
aaaaaactctgctgcctgtgagaagagaagggacagcggcttggagagacagaacggcaaaaccgctgctgctgctgcttctgcttctgctgctgctgctgctgcttttgcagctgattgagacactatgttgagtctacaggattctgtgttttttgaaattagcataaagtccttgttaaagtcctggagcagcagctcttcagcgccagtcagcaaagtaaataaatactgtgcttcttccaactttcattccacttggggaaaaaaaaatatcatcatgtcaaacattacgattgacccagatgtcaaacctggtgaatatgtcatcaagagcctctttgcagaatttgctgttcaagctgaaaagaaaattgaagttgtaatggccgaacccttggagaagctattgtccagatctcttcagaggggtgaagatcttcagtttgatcagttgataagctctatgagctcagtagcagagcactgtctcccttccttacttcgcaccttgtttgactggtacagacgccaaaatggaacggaagatgaatcttatgaatataggcctcggtctagcacaaagtctaagggggatgaacagcaacgtgaaagagattatcttcttgaaaggagggacttagcagtagacttcattttttgtttagttttagttgaagttctaaagcaggtaagctcttttatttctgcaaagtctgtattccttattctttgcttactgtgccttcgtgtttcagttactttaagatgctgtgtctagaattttagcccacataaattaaattcctgtaatttcattatacttctttcagttgcctggggctttcctgccctgtacctatctgttatctcctctattttttacctttgtatgcttatccaagatataaaatcttgttagcaaaatggagctgaatggaaattgtgttaatattgacttttagctgtaaatgtagtttgcctgccattcagctacttcagtcccttattccactttatttctcctctaagcccccaagcctgcattccaacatgtaataattgtgcacttttagtagaggcatggggtgatttgataagggtactgaattgtcatgtgcaaatgtttttcagtcaagtgagaatacttcagataataagttaggaatgtttattcattcaatgaatattagaatgcctactgtgtgctggcactgttttaggcaataaactcatgagcttgcacttgaatgggatagatacacagtaaagatatgaatatataatatagtgtcaggtatagtcttaatatttttattactccagatcagtataaatgcctgtgctgaatttgaaagctttttttttttttttttaaagatcatggtctttaaagttatatcattcaaggatgatccatgtatttccaggcacgaacattgtattcttttgaaacaagttaggaagcctaaaggtcagagtcatattttggatatgacacatttggacagggagttttgtttttgttacatagaaaggaatatgtgacaaacagcaaatacaagatataaaattaattgacagtctgtttttctcatagtataaaagtacttgaattatataatcagttttatttagcttttatttttacaaggaatatgaaaagacagttctttggtactctgaaatctgcaaataaacataattttaaatatgtaaaacagaagagttaattaaaggttaaatcactttaatatatgcatttcataaacgttttttggtagaggtaggaaagaaatctcctctgggagttgtgctaacaagccaaatttgacttctgtgatctcttggtttaactgagatactaagaccttaaggcagcagtcactaggataggaagagctaaggactggatatggccacagcccagcaatggactctgactactgctcattgtgatttatccctggtgtatcttgtgtgctaaatgtatttcatttaagtggattggtaaccagtatttgtacttttttgcttaaacaatatagggtttcttcctccagccagagaaatggcagactccctacattagcattcaggaaccccagtgacctggccccattgtgccttcctccttcgttcatttcccatggcatccttttcttagatgtcagtctcgctcctcatcctaaagttgcccaattgcactggcttcagaactacaattcacaggcaaccctgtggaggcatttttcccatctcttccccctcatcctccctgtcctcttcccctccttgttgcctttgtagccctcctcctcctcttttaacacagtccagataggtcttcatgtagggg

SEQ ID NO: 4430 - DNA, 3024 bp, Homo sapiens
agtgggtgggggaagctggtaggcacgggcggctccgcagtgaccggactcgggggagcagataatcaccagaatgggagtgaatgacttgtggcaaattttggagcctgttaagcaacacatccccttgcgtaatcttggtgggaaaaccattgcagttgatctgagtctctgggtgtgtgaggcacagacagtcaaaaaaatgatgggcagcgtcatgaagccccacctcaggaacttattttttcgtatctcatatttaacacaaatggatgtaaaactggtatttgttatggaaggggaaccaccaaagctgaaagctgatgtcataagcaagaggaatcagactcggtatgggtcttctggaaaatcgtggtctcagaaaacagggagatcacattttaaatcagtcttaagagagtgcctccatatgctcgaatgcttaggaatcccctgggttcaggctgctggggaagctgaagccatgtgtgcttatctcaatgctggtggtcatgtcgatggctgcctcaccaatgatggagatactttcctttatggggcccagactgtttacaggaatttcactatgaatacaaaggacccacatgttgactgttacacaatgtcatctatcaagagtaaactaggtttggatagagatgctctggttggattagcaatacttcttggctgtgattatctcccaaagggagtccctggagttggaaaagagcaagcattaaaacttatacagattttgaaagggcaaagtttacttcagaggtttaatcggtggaatgaaacatcttgtaactctagtccacaactgctagtcactaaaaaactggctcattgttccgtatgttcccatccaggttcacctaaggatcatgaacgtaatggatgcagattatgtaaaagtgataaatattgtgagccacatgactatgaatactgctgtccttgtgagtggcaccgtacagaacatgataggcaactcaatgaagtagagaacaatattaagaagaaagcttgctgttgtgagggattcccattccatgaggttattcaagaattccttttaaacaaggataaattggtgaaggttatcaggtaccaaagacctgatttgttattgtttcagagatttactcttgaaaaaatggagtggcccaatcactatgcatgtgagaaattgctggtacttttgacccattatgacatgatagaaagaaagcttggtagcagaaactctaatcaactacagccaattcgaattgttaagactcgaatcagaaatggagttcattgttttgaaatagaatgggaaaagcctgaacattatgctatggaagataaacaacatggagaatttgctttattaacaattgaggaagaatcattgtttgaagcagcatatcctgagatcgttgctgtttaccaaaaacaaaagttagaaattaaagggaagaaacaaaaacgtattaagcctaaagaaaacaatttgccagaaccagatgaagtaatgagctttcagtcacacatgactttaaaacccacatgtgaaatctttcataagcagaattccaagttaaattcggggatttcccctgatcctacattaccacaggaatctatttctgcctcattgaatagcttgcttttacctaaaaatactccatgtttgaatgcacaagaacagttcatgtcttctctaagacctttggctatacagcaaattaaagctgtcagtaagtctctaatttcagaatctagtcaacccaatacctcatctcataatatatccgtgattgctgatctacacttgagcactattgactgggaaggtacttcttttagtaattctccagctattcaaaggaatactttttctcatgatttaaaatcagaagttgaatcagagctatcagccatccctgatggctttgaaaatatcccagaacaactgtcctgtgaatcagaaaggtacactgcaaacataaagaaagtgttggatgaggattctgatgggattagtcctgaggagcatctactttctggcattactgatttatgtcttcaggatttgcctttaaaggaacgaatatttataaaattatcatatcctcaggataatctacaaccagatgtcaacctgaaaactttgtccatacttagtgtaaaagaatcttgtattgctaacagtggttctgattgtacatcacatctttcaaaggatcttccaggaattcccttgcaaaatgaatccagagactctaaaattctaaaaggagaccagctgcttcaagaagactataaagtcaatacttctgtcccttattctgtcagtaacacagtggtaaagacctgcaatgttagaccaccaaatactgctttagatcatagtagaaaagttgatatgcaaaccactcggaaaattttaatgaagaagagtgtttgccttgacagacattcctctgatgaacaaagtgccccagtgtttgggaaagctaagtacacaactcaaagaatgaagcacagttctcaaaagcataattcatcccatttcaaagaaagtggccataacaagttgagtagccctaagatacatattaaagaaactgaacagtgtgtcagatcttatgaaacagctgaaaatgaagaaagctgtttcccagattcaacaaaaagttctctgagttctctacaatgtcataagaaagaaaacaactctggtacttgtttggatagccctcttcctttatgccagagattaaaactaagattccaaagcacttgaaatttaaaacacttaggtataacttaactattttagtactatcagcaatagcagagacagagggaaggtatctagttcatgtgtggtaaaaattttaatgttctctgtgtcatgaaacacttgccattttaatcaaagttgtaatttttaaaaagtcacctaaaactctggttttaaaagatcctctgtattgaaaacttctgataatgtatgtcattatgtcc

SEQ ID NO: 4431 - DNA, 3105 bp, Homo sapiens
taaactatttgccatatcaccacaatcttatataatcttttttttttttttgagacagagtttagctcttgtagcccaggctggagtgcaatggcgcaatctcagctcactgcaacctccgcctcccaggttcaagtgattctcctgcctcagactcctgagtagctaggattacaggcgcctgccatgatgctcggccaattttgtattttttttttaggagaaatggggtttcaccatgttggtcaggctggtcttgaactcctgacctcagatgatccacctgccttggccttccaaagtgctgagattacaggcatgagccaccgcgcccggctataatctctcattttctaagctcatgttgcctaatttcaaattatataactttattgaaatattctttaagccactgactcctagtaagaaccgttttcactttgtttcctattttgaaaatgtaaactttatgttatgctggctacaggaaaataatttttgtttgcttttatgttttctttcaggtttgttatccaggcataagaccaagaaattatcttcagaaaaggacattcatgaaatcagtttatccaaagagagtataatagaaaaaagtaaaactcttcgtctgaaaggatccatttttagaaatgagtggcagaacaaaagtgagtttgagggtcaacagggacttaaagaaagatctatcagtcaaaagaaaatcgtctctaaaaaaatgtcaactgatagaaaacgtccctcttttactctgaatcagagaattcacaatagtgagaaaagctgtgactcacacttggttcaacatgggaaaatagattctgatgtgaaacatgattgtaaagaatgtgggagtacttttaataatgtctatcagcttactctccatcagaaaattcatactggtgaaaaatcctgtaaatgtgagaaatgtgggaaagtttttagtcatagctatcaacttactctgcatcagagatttcatactggtgagaaaccctatgaatgtcaagaatgtgggaagacctttactctttacccacaacttaatcgacatcagaaaattcacactggtaaaaaaccctatatgtgtaagaaatgtgataagggtttttttagtagattagaacttactcaacataaaagaattcatactggtaagaaatcttatgaatgtaaagaatgtggaaaagtttttcaacttattttctactttaaagaacatgagagaattcatacaggtaagaaaccctatgaatgtaaggagtgtgggaaagcttttagtgtatgcggacaacttacccgtcatcagaaaattcatactggtgtaaaaccctacgaatgtaaggaatgtggaaagacctttagacttagtttttaccttactgaacacagaagaactcatgcaggtaagaaaccttatgaatgtaaggagtgtgggaaatcatttaatgtgcgtggacagcttaatcggcataaaacaatccatactggtataaaaccttttgcatgtaaggtgtgtgagaaggcttttagttatagtggtgacctcagagtacattctagaattcatactggagagaaaccatatgaatgtaaggaatgcgggaaagcctttatgcttcgttcagtccttactgaacatcagagacttcatactggtgtgaagccctacgaatgtaaggaatgtgggaagacctttcgagttcgttctcaaattagtctacataagaaaattcatactgatgtgaagccctacaaatgtgtacgatgtgggaagacctttagatttggtttctaccttactgaacaccagagaattcacactggtgaaaagccctataaatgtaaagaatgtggaaaggcctttattcgtagagggaatcttaaagaacatctgaaaattcattctggtttaaaaccctatgactgtaaagaatgtgggaagtcctttagtcggcgtgggcagttcactgaacatcagaaaattcatacgggtgtaaaaccatacaaatgtaaagaatgtgggaaggcctttagtcgtagtgtagaccttagaatacatcaaagaattcatactggtgagaaaccctatgagtgtaaacaatgtgggaaggcctttagacttaattcacaccttactgaacatcagagaattcacactggtgagaaaccctatgagtgtaaggtatgtagaaaggcctttagacaatattcacatctttatcaacatcagaaaactcataatgtaatttaatataagaaaaggtttccatgtcatgctctatttatagaatatcaaaatatttatggccagaagttctgtcaatgtgttgatgtttttttacacatattaacttaataaatgtatgagtcttaaatacctcttaattctcattaaatttaggaaaattcacactagaaaataaagctgttaatgtaacagttgtggaaaagtgttctagcaacagcatatacttatcatcattgcctttccactactctactatctgtgtgatattagacaaaatatttgcttcttggtacctcagctgtaaaatgaaacacacctaaaagtgtggttgtttccaacatgtataatacagcaacaactatctggcccaaactgctttggattaatattggatattactgtttttattatcatcaacattattattagtggatttcttaataggaagatgcaatggagatgacaaatttggaaaaaccactcatcacttacatttcatgaagtacttctttgataaaatctgttatgggctgaatgtttgtgttcccgtaacaattcctatgttgaaacacgaatcccaaggtgatggtatttgaaggtagggcctttaggaggaaattaggtcatgagggtggagccttcatgagtggaattactgcctttataagaagaagccaaagagccagctagctctttcaaccacatgaggttacagcaagaagtcagcagtctacagtgcaaaagagggccttcaccagaacccaagcatgctggcaccttgaccttggactttcagcctccaaaactgtgagaaataaacctcagttgtttat

SEQ ID NO: 4432 - DNA, 2069 bp, Homo sapiens
tttattttgagacggaatttcactcttgttgcccaggctggagttcaattatgcaatctcggctcaccgcaacctccacctcctgggttcaagcgattctcctgcctcagcctcccaagtagctgggattacaggaatgtgccaccatgctgggctaatttttttttgtatttttagtagagatggggtttctccatgttggtcgggctggtctcgaactcctgacctcaggtgatctgcctgccttggcctcccaaggtgatcccacctcagccttccgagtagctgggactacaggcgtgtctaccaagcctggctaatttttgtattattatagagacagggttttgccgtgttgcccaggctggtctcgaactcctgggctcaaataataccccccttcggcctcccaaagtgttgagattacagatgcgagccgctgtgccccaccagggaataaaattttttaaaaccctagtgccatatgatgaaggggcccctgcttttgagggaagggctcctgccttttctcacgcttctctccaccccaggtatgatctcatgtaccagtgctggagtgctgaccccaagcagcgcccgagctttacttgtctgcgaatggaactggagaacatcttgggccagctgtctgtgctatctgccagccaggaccccttatacatcaacatcgagagagctgaggagcccactgcgggaggcagcctggagctacctggcagggatcagccctacagtggggctggggatggcagtggcatgggggcagtgggtggcactcccagtgactgtcggtacatactcacccccggagggctggctgagcagccagggcaggcagagcaccagccagagagtcccctcaatgagacacagaggcttttgctgctgcagcaagggctactgccacacagtagctgttagcccacaggcagagggcatcggggccatttggccggctctggtggccactgagctggctgactaagccccgtctgaccccagcccagacagcaaggtgtggaggctcctgtggtagtcctcccaagctgtgctgggaagcccggactgaccaaatcacccaatcccagttcttcctgcaaccactctgtggccagcctggcatcagtttaggccttggcttgatggaagtgggccagtcctggttgtctgaacccaggcagctggcaggagtggggtggttatgtttccatggttaccatgggtgtggatggcagtgtggggagggcaggtccagctctgtgggccctaccctcctgctgagctgcccctgctgcttaagtgcatgcattgagctgcctccagcctggtggcccagctattaccacacttggggtttaaatatccaggtgtgcccctccaagtcacaaagagatgtccttgtaatattcccttttaggtgagggttggtaaggggttggtatctcaggtctgaatcttcaccatctttctgattccgcaccctgcctacgccaggagaagttgaggggagcatgcttccctgcagctgaccgggtcacacaaaggcatgctggagtacccagcctatcaggtgcccctcttccaaaggcagcgtgccgagccagcaagaggaaggggtgctgtgaggcttgcccaggagcaagtgaggccggagaggagttcaggaacccttctccatacccacaatctgagcacgctaccaaatctcaaaatatcctaagactaacaaaggcagctgtgtctgagcccaacccttctaaacggtgacctttagtgccaacttcccctctaactggacagcctcttctgtcccaagtctccagagagaaatcaggcctgatgagggggaattcctggaacctggaccccagccttggtgggggagcctctggaatgcatggggcgggtcctagctgttagggacatttccaagctgttagttgctgtttaaaatagaaataaaattgaagactaaagacctaaaaaaaaaaaaaaaaaaaaaaaaaaaaaaaaaaaaaaaaaaaaaaaaaaaaaaaaaaaaaaaaacc

SEQ ID NO: 4433 - DNA, 4742 bp, Homo sapiens
aaaatcccacgtgactggctctcctctcaggccatcatggcgtctcccagtgggaagggagcccgggcgctggaggctcctggctgcgggccccggccgctcgcccgggacctggtggactccgtggacgatgcggaggggctgtacgtggctgtggagcgctgcccgctgtgcaacactacccgccggcggctgacctgcgccaaatgcgttcagagcggcgatttcgtctacttcgacggccgcgaccgggagaggtttatcgacaagaaggaaaggttaagccgacttaagagcaagcaagaagaatttcagaaagaagtgttaaaagctatggaaggaaaatggataacagatcagttgagatggaaaataatgtcctgcaagatgaggattgaacagttaaaacaaacaatatgtaaaggaaatgaagaaatggagaaaaattctgaaggccttctcaaaaccaaggaaaagaatcagaagctttacagtcgagcacaacggcaccaagagaaaaaggagaagattcagaggcataatcgcaaacttggtgacctggtagaaaaaaagaccattgacttaagaagtcattatgagcgtctggcaaatcttcgacgatcccatatattagagctcacctctgtcatttttccaatcgaggaagtaaagacgggtgtgagagaccccgcagatgtgtcttcagagagtgacagtgccatgacctccagcactgtgagcaagcttgctgaagcccggaggacaacttacctctcaggacgatgggtctgtgacgatcacaacggagacaccagcattagcattacagggccttggattagcctccctaacaatggggactactctgcctactacagctgggtggaggagaagaaaacaacccaggggcctgacatggagcagagtaaccctgcctacaccatcagtgctgcgctgtgctatgcaactcagctggtcaacattctgtctcatatacttgatgtaaatcttcccaaaaagctctgcaacagtgaattttgtggcgaaaatctaagcaagcagaaatttactcgagcagtgaagaaactgaatgcaaatattctttacctttgtttttctcagcatgtaaatttagatcaattacaaccactgcataccctcaggaatctaatgtacctggtcagtccaagctctgaacacctaggcaggtcagggccctttgaagtacgagcagaccttgaggagtccatggaatttgtggatcccggagttgctggagaatcagatgagagcggagatgagcgcgtcagcgatgaagaaaccgacctgggcacagactgggagaacttgcctagtccccggttttgtgatatcccttcccagtctgtggaagtctcccagagtcagagcacccaggcgtccccacccatcgcgagcagcagtgcaggtgggatgatctcctctgcagcagcctcggtgacctcctggtttaaagcttacactggacaccgttaacgagcatggaccaaaacataccaaatctgcatcaagaaagttcttctcccactacactctagtaaacattttctgtttaagttaagatagtgtctggaacaaagaggttaaagtgttgttttgttttgtctttttaagcagggagacaaacatttctatttgccaagtggcctgtgatggtgaccaacatgcttatgataattaagagaacaggggtcgaaggtctttctacccagaccagtgctggtggaaggaggacctgtgcgtgtggccagttctgccaaggaagcagttgatttgggttccctctgggcccgggccaccgggcccacagatatgggtcagtgtgctggtccttgcggtgctgagactgttcctgacactttaagttttagaggttggttgaatcacaagaggtgattcttgattattaggacatgaaagataaaagctctttaataagagtttttctgccattgttttttgtatgagaaccagcaggcaatttaaaatttctaatttggtcctttgattttgtttgggaggggtgagttacacgtactttattcatgccgctctgtcgtagtttgtcagacattcctgtttttctttcccccacacaccaaagaaaatgaaagtctttttctttaggacccacatccataaatggaagaaatcctggctgcaataatgtctagagagtttttaactattttcttgtattctgaggggaattaagcttattcttacctagttgaattcctgccatccacactatgagcattttgaaattgaacttatattttctgggtgaaaataagtcatgaaggtcattcccttatgtaagctcaatgcctgcctgggcacaggggaaaagccacttagttaagtggcctctggtcattcttgtggtgtccactttctttctatgggattgagtaggtggcaggtgttttcaggggaaaccatcctacttgtttccccgaactctttgttgctctgaggacacagctttgctcagaaatgcagcgcagatccttacggctgatgctactctgctctgttctggggaaagcacaatataaagaaagaatttcccagccgggcgcggtggctcacgcctgtagtcccggcactttggggggccgaggcaggcggatcgcttgaggtcaggagtttgagagcagcctggctaacatggtggaaccctgtttctgctaaaaatacagaaaattaccgggtgtggtggcgcacgcctgtaatcccagctactcgggaggctgcggcgggagaatcgcttgaaccgggaggcagaggttgcagtgagccgagattgtgccattgcactccagcctgggcaacaagagcgaaactccgtctcaagaaaaaaaagaatttccctcagcaggagatcattttcagctcacgtgtcttgtcattcttttagtgacaatcttacaagaaaactataatgagagaggcattatgtacaaatatgtaagtagtttatttttaataactgcaaaaaaatcctatgtaacaactaccaaaagaaatcctatgaaagagtcctaacaggcattattaccatatcttatgtgattggcatgatagcacctctgataaatcattcagaggtttgccatgccccagcttcttttctcatcataataattgtagttgatactttgcctccaagtccgaggtgctatatagcttttgctaatggtatatttggtgttttgtatagttttgggtagagttgcagaacggagtttgtttctatccggtagtcacaaattccttggctctatgaattttccatgaaaggaggaagtaggcttttctcgttgtgggtggtcttttttttttttggagacggagtctcgctcagctgcccaggctggagtgtagtggcgccatctccgctcactgcaaccaccatctcctgggttcaggcggttcttccgtctcggcctcccgggtggctgggattataggcacctgccatcatgcccggctaatttttgtattttggtagggacgggggttttcgccatgttggccgggctggtcttgaactcctgacttcgggtgatccgcttgccttggcctcctagggtgctgggattgcaggcctgagccaccgcgcccggccccttatgggttcttctacactgctgggatctctgttttaagtgctcagcttcatgattgattgctgggcttccattttcccatccagttctggagttcgtagagagtgaagatggtagacttgaacagataaataaacttaacgatcttgtaagagttgtctagctacttaaaaccctcagaagtaagagcttagtctcacgagttgtaagagtgggatttggagcttggtggtggagactgacttcagctgagagatgcacaacagtcatggttttcttaagcctcttatgaaaccatgaatgagagatgaagctaaagaatagaatccagagatcacaaactcatctagagtacttccacaaaatttacaaagatgtgggaactttatggataggatatattttgtttgttgttgttaatatcaactagaggcactttacatagggttaagtgatcgaacccttttgtggttttgaacaccaacatactggcttacactgctgaaatattttgggtttcattattttgcactggatccaccctgtaaatactcttaagtatacatttcaaccactgttttttctactctttttgctgctcattaaaatctttcatgtaggtgccagaaccatatgtaaacagctttttaaaaaattgaagctggtattttgtttaaacaaaaagccatagaacttggtcatgttttccattttaaaatgatttactgaaacaaagtaatactaataaaaacccacaggcaccaaacaggctgcttaaaatggtctgttaaagacattttttggttatggaatataagaaaagttttgcacatctgtaagggggaaaaacagtatatcaccattgggtagagtggacgggactcatgtaaggactcaatttggggaagagcattcagtggcatgctgttagaggactagtgtccgagaatctcctcacagtatcatgttgcaggaattccccattgctctgcaacttccaaaccagtttgagtcatacaaatgttttctaaacttttattgtattactgcaataaatcttttaacagt

SEQ ID NO: 4434 - DNA, 4144 bp, Homo sapiens
acttcccgagcttttaggggaagaggcactcgtgaataattcagcctctttcactgagatgaaaacgccctaatagaactaatggactcgctgcctcaaaactcgactctggtgggactcatctcattcaccaattgcttctgacgtcctgcagtgacactccctaatgaaaaagccgctgtgccagatccttagagtgtctggtgatccctaataaaccagactgtggcctttttaacgagcagacgcccccacgaaggcagtggcagctcccaagccaggcggcaccatgctgtccatgacgtacagcgagagtctgcggagcgtgagcagcaggtgccactctgaatgggccctgcaccccgtccgccagacggacacgctggaactgcagcggctgcgggaggtgcgggcggctgcccaggccaggaacatggagagcttcctccgcatgcacggcctttccctggacggctgcaccgcccagcgcacaggcatgaagtatcggaacctgggcaagtctggcctgcgggtctcctgcctgggacttggaacatgggtgaccttcggaggccagatcaccgatgagatggcagagcagctcatgaccttggcctatgataatggcatcaacctcttcgatacagcagaagtctacgcagccggcaaggctgaagtggtactgggaaacatcattaagaagaaaggatggaggcggtccagcctcgtcatcaccaccaagatcttctggggcggaaaggcggagacggagcggggcctgtccaggaagcacataatcgaaggtctgaaagcttccctggagcgactgcagctggagtacgtggatgtggtgtttgccaaccgcccggaccccaacaccccgatggaaggggacccatttagttcctccaagtcaaggacattcatcatagaagagaccgtccgcgccatgacccacgtcatcaaccaggggatggccatgtactggggcacgtcacgctggagctccatggagatcatggaggcctactccgtggcccggcagttcaacctgaccccgcccatctgcgagcaggctgagtaccacatgttccagcgtgagaaagtggaggtgcagctgccggagctgttccacaagataggagtgggcgccatgacctggtcccctctggcctgtggcattgtttctggcaagtacgacagtggcatcccaccctactcaagagcctccttgaagggctaccagtggctgaaggacaagatcctcagtgaggagggccggcgccagcaagccaagctgaaggagctgcaggccatcgccgagcgcctgggctgcaccctgccccagctggccatagcctggtgcctgaggaatgagggagtcagctccgtgctcctgggggcctccaatgcggaccagctcatggagaacattggggcaatacaggtccttccgaaactgtcgtcttccattatccacgagattgatagtattttgggcaataaaccctacagcaaaaaggactacagatcctaagccgcccccgcccgcctgctcggacagtttccgttccctcctagtctctgttcgctcgcttaagctgttttgaagccaagtgaagagtgtggtttgcatccaagagaaaacaccacactgtgatgtcatcgggaaatgatctcccaagtcgctgccagacaccacccactgcttcgccggacaatgtcgaagtccagtctgtgccggggaaggcactggttaggaaggatgttcaaacggtcccacccaagcctgtcacctctgctcatcctccaagaccacccagctttctcccagccacagccaagattcccaaagtcaaggcccaaagatttccaaggttcccaaagtcaaggccaggccaaggcctggttgggtccttggggcgggcagggccggcctctcctctgctgagaatccccacttggtgtagggggagaggggaaaggggtctggcccatcgaggggccccttctgccagggccttggttgctggggcagggcctccccactgggggtcttcctccacctcccactttccaagggctccaggaatctggggcctgaccacagattcctctcccatccttttctgctccaacctgccccactgggtcccggcaggggccatgcctaccaagctcgagctggcccttgacccccacccacccccacccttgctggcaggggcagggaccccagggggattgactctgcagtttgggagccacaaaaagcgtagcggtgtgatttctagctcagcctcccaccgtcttcctcctacacaccaatgatgagcctcatgccagtgaggcccggagcgcttgggaggggtcccagtggggcaggcccctctgtctggccacccctctgtcctggccccggaaggccctgtggtcatgtgctcctagctgcacggtggctgctggccacaccacggcaagtggcagcaggggccggccctgtgcacaaggatgcactcctctcggcccctgtagactttctctaaagccgcccgccagcccaggccgctgctctgcaccgagctggtgggcttgggttttgtggagcgcatgcttggaccctttcagtaaggaagggtctttggggttttctgtgcccatgacttgggggctgcacccccacagcacccccacaatgtaggaaaagacctcagggaacctctccctggaaagacgggcagggctggttagcccctcccactgcctgacacctgggacaggctgggcagaggggagagagggcaggacaggccagagtgacgcccccgtgcagcttgggccggagggcaagggatgccagtaagtctgcaggtgcggggtgccacctacaggcccaggcctgtgtcccaagcagtacccaggctttgcagaccacgcggggcagggctccactgaagccacccccacccctcgccagctagctccatagggaagcctgtgtctcctgcccccagggcgcaccctcagtgcaggcacctctgttcccgctttgcccctggaggagccactattccagaaggctccaccctgccgtcctgcgggagcctgctgtccagtcctggccgggccaaggcctgggaaactgtgaaagtcagaaaggccagcggggagaggctggggcgaggggaggagggggatcagcttctgctattaccgaccccccttcatgctgcccctggcgcctagaacccttgcccctcctcatagaccaagtcccgggggtctccactcagtcctgctgcctgcttcaccagaagcagccctgtgagtgtggggtggggaagtcccttcccaacggaggtcccagcctatggccctgggcccaggtgggggtcgcctgcttccttcccggacagggtcctgcagtggccaatggtgccagagggcaggtggcccaccctcgccgtcagggagggtggctggccccatccccactgccacccagccccacccactgttggaagagggaccagcgcgaggtggtgcccagggtgggcactgctgcttaatgcgaggcacacctggggcagctgagccccccgaaggctgcgggtttgccaaacacagagaggccaggccccagtgtcaggatgcagtcagcctctggcgcagctctttccacgacctggttcctggatgtcctgcttgctccacacccatctacagggaggatgtgagggggctctgcctcctagggccaggtcccccctctcgggagggggtattgggtaggaccatccaagaaagggcagaagaccaagggcagtcggggtctagaaaggagggcgctggccctgctgggcgcttcggagcccccactgtttcccactcagctttgtgctcagatcccaggtcccaaggagtgacaggggcttcctcccaccttctgtccttgtccagtcatgtaaataatgtgctatttctctccccgagtctttttttttaaaacctaccgtggttcctcagctaactgcattccctacccaggcagagactgtcctatgcctcgagcttccaaacgagactcagaccgcgacacagccaccgtatttatggaatgacaaaataaataaagcccaaaccc

SEQ ID NO: 4435 - DNA, 4730 bp, Homo sapiens
gaaaagcaaagcaaagccactcacatgaggtcttgctcctggggacgggcatggccaggactccaaccccggcagcctgtcccagagccctggagctagccccagtgcagtctctccaccaccccgcacttcctcaggccaccttcctgccacagccttttccccaaacctggtatcaccccctctcctccctccctaatcccacctctcgggcctggccactccaccccaccccttccaggactcagattcagactctgagggaggagccgctggtggagaagcagacagtgagtatcttcctggagggacagggagcagggttctggggggcggggggatttcagggcaggggtgtgggtgatacctcctcaactccatcaggagtgacatccaaagtatgtagcagtgggttgggtaccagtgccagagcaggctcctggaggccgctggctgggccgggccttgtgcctttagatgtggggaggccgggaaccccagggctggggccagggtgccggagacatccatgcccctggctgaatgcccgtcctgccgctgtctctcttctttccggtcagtggacttcctgcggaacttattctcccagacgctcagcctgggcagccagaaggagcgtctgctggacgagctgaccttggaaggggtggcccggtacatgcagagcgaacgctgtcgcagagtcatctgtttggtgggagctggaatctccacatgtaagtaacccttctcccccagcagctacccccaggaactggggagtccctcccaagggctggggaggagccctatctgagccctgtcctgggagggttagtatggtatagaccaactgctccctgacccccctttcctagccgcaggcatccccgactttcgctctccatccaccggcctctatgacaacctagagaagtaccatcttccctacccagaggccatctttgagatcagctatttcaaggtttgtgctcccccaggaaggggcgtctgtgaggggtggggatggggtcacctggctccaaccctcacgctacctggggcatctggccctctggctgtctctcctacagaaacatccggaacccttcttcgccctcgccaaggaactctatcctgggcagttcaaggtgagatctttgttttgcagggggcgaaacaggaagggttgggggagggcacgcatgagaagccccgccaaggccctgcagacaaatattatgtagccattaagtacatgggtgctgggcccagactgcctcggttcaagtcctggttcctcgtgtcttcatcttacgaccttgagcctccgatttgcctcctgtgaagtgaagctaatggtactgtctgaagagggctgctgcgaggcttagctgactaatgatgccgttgagagcccgggaccctgcagccgggctgcctgggtgtgaatctcagctctgcagcttacccaccgtgtgactttggcaacacaatccccttccctgtccttcagtttcctcatctgtgatctggggatagcagtggtctctccccgacgcggctgctgtgacggttccctgggggtaaaacagtcacagtgcctagaacagttcctggcatgcggcagtggcctgtggctgttccctgcagtcgtcagcagtgctgtcgctcttccctgcagccaaccatctgtcactacttcatgcgcctgctgaaggacaaggggctactcctgcgctgctacacgcagaacatagataccctggagcgaatagccgggctggaacaggaggacttggtggaggcgcacggcaccttctacacatcacactgcgtcagcgccagctgccggcacgaatacccgctaagctggatgaaagagaagatcttctctgaggtgacgcccaagtgtgaagactgtcagagcctggtgaagcctggtgagcctctggccagggacctgcccaggtggatttgggtgggggtcccctcctccccctgaccccctcccaaaggccacacccgcacacatctggccacctctgtctctctgaacagtgccccagatccatcctggggagaatggggtctgtgcccctggccggtccccactgctcccaactcccactgtggcctccgggtctgccattgctcccacctgtcctctctgcctccccatgtcactgtctctgtccgtccatctgtctccacctcagatatcgtcttttttggtgagagcctcccagcgcgtttcttctcctgtatgcagtcagtaagtggccccccagcctccccgcatccccaaccgccgcctccacctgtgctgggccccatgggggcagcctgggccctgcctcaggaaaggtcacctccccagctatggggggcggcagggaggtttgctgctgggggcgggggagggagcggtggcgcagcctgggcggaggctcccaagctcacgcccctccccgcaggacttcctgaaggtggacctcctcctggtcatgggtacctccttgcaggtgcagccctttgcctccctcatcagcaaggcacccctctccacccctcgcctgctcatcaacaaggagaaagctggccaggtaagagcccttcttcaagcccccgtcgtcacaggctcccccttccctctcacccttttcctcagagggaacccccactgtggaaccccagcactttgcattcctcagctcagaacctggggctctagaatccagaggggtcgggttccaggcctctgggacattcactgcccttttgagcaagtgatagaattccaactcaaaccagctgaagccagataggaaggccgggcttccagggactgaggaggtgggagggggtgcaggggtcaggagagacagtgcggggggcggggttgggtccacgctctgggtctctcaggtctgtttttcctgggcagcctcactctagggcaggtgctccctcctaggtgttcccctcaggggaagtaggcagggtcaccgggcaagcagcgcacgctgtgggcagacactgtcccaagtcttagcctgcgtgaactcactggcgccacaaccccatcgcggttttgtgatcacccctattctacaggaaactaagacacagagaggacaagtcacttgaccaaagtcactgagctggctgggcgcaatggctcacgcctgtaattccagcactttgggaggccgaggcgggtggatcacctgaggtcaggagttcgagaccagcctgaccaacatggtgaaacctcgtctctactaataatacaaaattagccgggcatggtgctgggcacctgtcatccaggctactcgggaggttgaggcgggagaatcacttgaacccaggaggtggaggttgcagtgagccgagatcacatcattgcactccagcctgggcaacaagagtgaaactttgtctcaaaaaaaaccaaaaaaacaacaacaaaaaaaaaacaaagtcacagagctaggatacaaacccaggccacctggctccagggtctgtgctcttagctctcccttccctgctcctgcccctgacccacccccctccctgacagtcggaccctttcctggggatgattatgggcctcggaggaggcatggactttgactccaagaaggcctacaggtgaggccccgccgggggttggggcagcctggaagggacagggtgaggtgggagcgggggcacgaaggcagatgagaggagcaggcaggggcgagcccgcctgggaactctgatctcctgctgcaccgcagggacgtggcctggctgggtgaatgcgaccagggctgcctggcccttgctgagctccttggatggaaggtgaggagctgagcaaccccagcctgtcctgagccccatccctggaccctctccccaccccatgggtcctctgaccccatgatgcacagtgacctttgacttctgtgacctttgctcctgcagaaggagctggaggaccttgtccggagggagcacgccagcatagatgcccagtcgggggcgggggtccccaaccccagcacttcagcttcccccaagaagtccccgccacctgccaaggacgaggccaggacaacagagagggagaaaccccagtgacagctgcatctcccaggcgggatgccgagctcctcagggacagctgagccccgaccgggcctggccccctcttaaccagcagttcttgtctggggagctcagaacatcccccaatctcttacagctccctccccaaaactggggtcccagcaaccctggcccccaaccccagcaaatctctaacacctcctagaggccaaggcttaaacaggcatctctaccagccccactgtctctaaccactcctgggctaaggagtaacctccctcatctctaactgcccccacggggccagggctaccccagaacttttaacccttccaggacagggagcttcgggcccccactctgtctcctgcccccgggggcctgtggctaagtaaaccatacctaacctaccccagtgtgggtgtgggcctctgaatataacccacacccagcgtagggggagtctgagccgggagggctcccgagtctctgccttcagctcccaaagtgggtggtgggcccccttcacgtgggacccacttcccatgctggatgggcagaagacattgcttattggagacaaattaaaaacaaaaacaactaac

SEQ ID NO: 4436 - DNA, 4045 bp, Homo sapiens
gctccagccatgccgaataaaaacaagaaggagaaagaatcaccaaaagcagggaagagtggaaaaagttcaaaagaaggacaagacacagtagaatcagagcaaatttccgtcaggaaaaacagccttgttgctgtcccgtctacagtatctgctaaaataaaagtaccagtctctcagcccatagtgaagaaagacaaacggcaaaattcttcaaggtttagcgcaagcaataatagagaacttcaaaaactaccatccttaaaagatgttcctcctgctgatcaagagaagctttttatccagaagttacgtcagtgttgcgtcctctttgactttgtttctgatccactaagtgacctaaagtggaaggaagtaaaacgagctgctttaagtgaaatggtagaatatatcacccataatcggaatgtgatcacagagcctatttacccagaagtagtccatatgtttgcagttaacatgtttcgaacattaccaccttcctccaatcctacgggagcggaatttgacccggaggaagatgaaccaacgttagaagcagcctggcctcatctacagcttgtttatgaatttttcttaagatttttagagtctccagatttccaacctaatatagcgaagaaatatattgatcagaagtttgtattgcagcttttagagctctttgacagtgaagatcctcgggagagagattttcttaaaaccacccttcacagaatctatgggaaattcctaggcttgagagcttacatcagaaaacagataaataatatattttataggtttatttatgaaacagagcatcataatggcatagcagagttactggaaatattgggaagtataattaatggatttgccttaccactaaaagaagagcacaagattttcttattgaaggtgttactacctttgcacaaagtgaaatctctgagtgtctaccatccccagctggcatactgtgtagtgcagtttttagaaaaggacagcaccctcacggaaccagtggtgatggcacttctcaaatactggccaaagactcacagtccaaaagaagtaatgttcttaaacgaattagaagagattttagatgtcattgaaccatcagaatttgtgaagatcatggaacccctcttccggcagttggccaaatgtgtctccagcccacacttccaggtggcagagcgagctctctattactggaataatgaatacatcatgagtttaatcagtgacaacgcagcgaagattctgcccatcatgtttccttccttgtaccgcaactcaaagacccattggaacaagacaatacatggcttgatatacaacgccctgaagctcttcatggagatgaaccaaaagctatttgatgactgtacacaacagttcaaagcagagaaactaaaagagaagctaaaaatgaaagaacgggaagaagcatgggttaaaatagaaaatctagccaaagccaatccccaggcacagaaagatccgaagaaggaccgtcctcttgcacgccgcaagtccgagctgcctcaggacccccacaccaagaaagccttggaagctcactgcagggccgatgagctggcctcccaggacggccgctagcctccggggcgccgcgtcggggccgggcccgccagttcttttccggattctgtagaaaatacatacttcctgtgccataccaatcagttacactcaaagctttcttggaccccgttccgtaggcaataacgtgcgtccgcctcagcgcgagattaggagttcaaacaatggtgacttcccagagcccgctggcagagccgcgggttgacgacggtgtcctcgcagtgtcgccgccaccccagcgtagtccaagtcagactatttcacaaagtcagagcgataggaaagcaccctgcccttcatcttcatgttctcccaaatggaacttaggatcttttaacataggtggttctgtgataacatcagtgttttccaaatcaaaggaacgctttaaaaaataggacctattttttaagactttacagcctttgaaatggtttccacgtgattgttacgccagcagttctcgttttgtttgtttttcaatctcagtgaaatggctctttgctttcgagttctcacgcaacgtactgggcaaatgacaatcctcagccgctggtattttctaaggggtctcttcactttgatgagtgacatgaacaccgtgtctccttctcttgtgtgtacctaaagccatatttccaagtctgtggtactccaggattccaggagtaagcctgtagaagagatttattttaaaagagattgctctgaaatttatcttaaaagagcttgctctgtctaccttgacagaaattggagttttaaaattatgtgttaatatttttatttgcagatttcgtttccgtcaacttaaacattgttgcccttcaacaaggctcttgaattaataaaattatagtctctaagaattccacattttatggaaagttagagcaaaatcattttgagttaagccagttcttagcctaatgcaaactgcagcgcctttaagcataaagtaacacaacagcattgcacggggccggcactgccgctgccttcactgaaggctgcagtgctgttctgagagcttggaggaggcaccagcgaggatgacgtttagtggagctctttctgttgaaaagagctcacgttatcaacaccttgtaaggaaaatacagtgtctgagttttcatcggtcttcacatgctgctatatattccacagagttccttgcatgtactgagcttttgttttagatggaatagcacaaggagaaaaatctttaaacttagtgctttgtctattctttatttctctcagggtggccagtattttgacttatttatcctgcttgaaagctacttgagatgtgtactgctattctaaacacgtgatctagtttctttcatctctggcataagattatataacttaatgttaagtgtcttgaggcataaaagacaaaatgtggcttattttaggatctgttttttcatcgaggtctcgggtatcctttcaaagatagtgagaagcagacactgctccttgtgcagctctggtacctcctgcccactgctgtcacttcaagccactggcaatgcttctgtcctcgtgtcttggaggaaaatcacctggggggaggggacttcttgtggtaagagcaagtgcaggtatgaaatgcgaagattgccccagctaaaagtggacaagtccgctttgtgagatgaatacttcctgagaaacttgacaagtatctctccattttaccattatgaaaactatcattaaaaaaaacagtttagatgccttctccttttgagggaaaaagggtgctttttattgtataaagcagcgtcttatgtattttgatataccattgtttgaacttccgtctttagctgatagattctcaaatatccttgattttggatgttcagtatgtttgtgagagaggtttctgggaagactctctttttgccctcgggaaaaagcaaaatatcaatgtttgggtgactgtgtaaagctcagtgtgtaagaacatctttttgtctaggttttctttctgctctttattgaagacaaacactcaccaaaaagaaaaataaaagttttcagagaaactaattttctttggcaagagtattacttaatattttggcctcctaaagtttccctagttagtactcggactcctgtgctaattgtcagcttacatatcattgtatagagactgtttattctgtaccaaactgatttcaaaagtactacattgaaaataaaccggtgactgtttttcttcataaagttctgcgtttggcatcttcactctttccaaaatgtatctgtacatcagaaatgtcactattccaagtgtctttttagtgtggctttagtatggcttccttttaatattgtacatacattgtatctttgttttatggtaataagtaataaaaatgtagacttc

SEQ ID NO: 4437 - DNA, 1976 bp, Homo sapiens
gtccgagtcagccctgggcagcggggaggtccccagagggggctgggccctgtctgggtatggggaagcttgctgcctctggttcccttttctccccttcactggcaacctcttgtcccttcccttttctctctttctttcctgaccctctcccttccttccttctttccctccatttttccttcctctttcactgtcctcccctctgcctccttccttcccttcctcttaagtggtgaccatttccccaaggcccagacacagcccatctcgccggagtggaccatgcactgcagctgcttggctgagggcatcccagccaaccccggcaactggatctcagggttggccttccctgattgggcctacaaagccgagtcgtccccaggctcccggcagatccagctgtggcacttcatcctggagctgctgcagaaggaagagttccgccatgtcatcgcctggcagcagggagagtacggggaatttgtcatcaaggatccagatgaggtggcccgcctctggggccgcaggaaatgcaaaccacagatgaattatgacaagctgagccgggccctcagatattactacaataagaggatcctgcataagaccaaaggcaaaaggttcacatacaagttcaacttcagcaagctcatcgtagtcaactatcctttgtgggaagtgcgggcgccgccatccccccacttgctgctgggggcccctgccctgtgtcggccagcgctggtgcccgtgggtgtgcagagtgagctcctgcacagcatgctatttgcccatcaggccatggtggagcagctgacaggacagcagaccccccgagggccaccagagacctctggggataagaaggggagcagcagcagcgtctaccgacttggctctgccccaggcccctgccggctgggcctttgctgccatttggggagcgtccaaggcgagctgcctggtgttgcctccttcactcctcccctcccgccccctctgccctccaactggacctgtctctcggggcccttcttgcctcctctcccgtcagagcagcagctcccaggggcttttaagccagacatcctgctcccaggacctaggagcctaccaggggcctggcattttccagggcttcctctcttggcagggctgggacagggtgcgggtgagaggctttggctcttgtccctcaggcccgaggggctggaagtaaagcctgctcccatgatggaggcaaagggaggcctggatcccagggaggtcttctgcccagagacccgcagactcaaaactggggaggaaagccttacttcccccaatctggagaacctcaaagcagtgtggcccttggatcctccttaactagagaggaaggtgggaagttggggaggagtcctccaaagtccatctctcctcttgcccaccgcctctgggttagtcccttcccctggctggacatgggctgaaattgcaggatttgaaggggtggagttggacccaaggtggggagcattgcagggaaggtgtgaatgtggaaatgggaaaaaccaagacagggtgcccctcctctttcaccatattgctaagcagactaaggggacattcctaatctcaacttttcttcagggagacgagaataaagtttctataatttccatcctgcccacataagggggaaaattaagggtctagcctggggagaggacaggggtggttgtgttccctgagtcttgtctggggcccatctccccattccaggctaaggtctccagtccctttctcacccctccatgcaacttctctcccatccctctgatttctgagaccctagaaacccctgtcccatgcaggcacttcctcctctctccatttccccaggacccaggcaagtggggtggggagacactggccttctctgctctgtaatactccactgtgaccatgaataaaatgcccttgcaaactgt

SEQ ID NO: 4438 - DNA, 2642 bp, Homo sapiens
tataaaatagtaccaaatagacatcaaagatgtgaaaaatactgtaactgaactaaaaaaattcaatggaggtattcaacagcagattcaatgaagcagaagaaaggatcgatgaaatcaaagacaggtcactgaaaaaaatccaatctgagcaaaaagaaaaaagaatgaaaaggatagtttaaagatagtttatgagacctgtgggacaccatcaagtggacaacaaatgcattattgatatgtcagaaaaagaagaaataaaatatattcaaagaaattatgtcagaaaacttcccaagccttatgtcagaaaacttcccaagcctggggaaggagatagaaagccaaatccaggaagcccaaagaacaccaaataagatgaacccgaaaagatccacaccaaagcaagttataatcaaattctaagttagagagagttgaaaacagcaagggaaaagtgaattgtcatatgtaagggaaccaccctaaggccagcagtggatttcacagcagaaaccttacagatcagaagagagtaggatgatacattcaaaaccctgaaaggaaaaaaaaaaaaaaaaaaaaacactgccagcaaagcatactatacccagcaatcctgtctttcaaaaaacaaagggatgatcaagactttctcaaataaaaacagaatttatccccactagaccagccttacaagaaatgctaaagggaattcggaagagaacgttaatcagcaacgtgaaaacatgaaagtataaaactcactgaaagaggagatattacaactgacaacatagaaatacaaaggatcatgaaagactactatgaacagttataagccaacaaattggacaaccagaagaaatgaatacattgctagaaatatgtagcttaccaagactgaatcacaaagcagttggaaatctgaatagtccagttatgagtaatgagattcaatcagtaattaaaagtctccaatcaaaataaagcctaggacctaatggcatcatagccaaattgtaccagacacttaaagaagaaccaataccagtccttttcaaactcttccagaaagttgaagaggagggaattcttcaaaatttattttatgaggccagcagtaccttgataccaaagccagacaaagatacaacaagagaagaagactacatctcccttcatctgaatggtaagaagaaaaagaagactgcagaccaatctcactgatgaacatggatgcaaaaatcttcaacaaaatactaagaaaccatattccgtagtatattaaaaggatcattcaccatgattaagtgggatttgcccttgggatgtgatggaaatgaataaatgtgagtcaccatgtaacagaataaaggacaaaaatcacatgatcatctaaatagatggagaaaatgcatttgacaaaattcaacatcctttcatgatgaaaactctcaatatattagatatggaaggaatgttcctcaacacaataaaggccatatatgacaagctcatagctaacattgtactcagtggtaagaagttgaaggcttttcctataagacctagaacaagacaaggatgcccgctcttaccacttctgttcaacatagtaccagaagtcctagcccgagcaattaggcaagaaaaagaaataaaagacatccaaataggaaagagtgaaatgaaattgtctttgtttgctgacaacatgatcttacatattgaaaatctcaaagactgtaccaaaacaccatttgaattagacaaatccagtaaagttgcaggatacaaaatcaacttacaaaagtcagtacatttctatacactaacagtgaactttctgaaaaagaaattaagaaaacaatcccatttacaataccacttacttctaagtaaaatacttagaagaaaatttaaccaaggaagtgaaagatctatacactgagaactgtaagacactgatgaaggaaattaaggacatcacaaataagtggaaagatacccagtgtttatggatggaaagaattaatattgtgaaaatatttataccaccagaagaaatctacagatctaatgcaactgccatcaaaattctaatgtcattcttcacagaagtagaaaaaacaatgctaaaattaatgtgggggagacacaaaggatcccaaatagccaaacaatcttgaccaaaaagagcaaagctggagacatcacactactgtattgcaaaatttattacaaagctatagcaatcaaaaaagcatgatgctggcataaaaacagacaagtctaccaatgaaataggacagagagcccagaaataaacccatgcatctacagtcaattgctttttgacaggaacacacattgaggaaaggacaatctgttcaaaaggtggtattgggaaaactggatatccacatatagaagaatgaaagtggatctttatttcacccctcatatgagaatcaactcaaaatggaataaagacttgaaactatgaaactgaaactataaaactgctagaggtctggacagagatttctttgatatgaacccaaaagcataggcaataaaagcaaaaatagacaaatggaattgcattgaagtgaaaagctactgcatagaaaagg

SEQ ID NO: 4439 - DNA, 4459 bp, Homo sapiens
agagtcgtaagcccttaaaagggccaggaactctttcttcggggagcttggttcttgagatgcaagtctgtcgacgctcccagcagaataaagcctcttccttctttaacctggtgtctgaagggttttgtctgtggcttgtcctgctacatttcttggtttcctgaccgggaagtgaggtgattaaggaacagtggaggcagccccttaggcggcttagccttgccctgcggagcatccctgtggggtactccggccagcttgagcaatgtggatcctgagagtgctcctgggtaggcatttgccccagtggaatgcctcatcagagtggtgcatggcaggcccccacggaggatcaacacaggggctgaacactgggaaggaactggcacgtggagtccggacatctggaatatgggagagcgcagcctgggatcacaaagaaagcaagtcatctgcaacctgctggagcctaagaccagaaggcaggcccgacttccgagaccatccttggatgtcactagactgggagctgtacgtggacgggagcaactttgtcaactcacaaggagagaggtgtgtgggatatgcagtggtaaccctggatgctgtcattgaagccaaatcgttgccccagggcacttcagcccagaaggccgaactcattgctttaattcgggcctcagagctaagtgaaggtaagactgtaaacatttacactgactctcagtatgcctttttaactctccaagtgcatggggcattatacaaggaaaaaggcctattgaactctgggggaaaagacgtaaaatattagcaagggatcctgcaattattagaggcagtttggaagccccaaaaggtggcagtcatgcactgcagaggacgccagtgagcttccaccttgatcaccttggggaactcctgagctgattcaggggctcaaaaagcagcatccaccccctcccgggcatcagtcacagcccccctgctccctcaggcacctgaccttgtacctacttactctaaagaagagaaggactttctccaggcagagggagggcaggtgatagaagagggatggatccggttatcagacggaagaatagctgtgccacaactgctaggagccgcagttgtactggctgtgcatgagaccacccacctaggccaagagtcacttgaaaagttgttaggccagtacttctacatcttgcatctgtcagccctggccaaaacagtggtgtagcagtgtcacctgccggcagcacaatgctaggcaaggtccaactgtcccacccggcatacaagtttatggagcagcccccctttgaagatctccaagtaaacttcaccaagatgcccaaatgtggaggtaacaagtatttgctagttctaatgtgtacatactctgggtaggtggaggcctatccaacatggaccaagaaagctcgtgaagtaacccgtgtgcttctccgagatctcatccctaggtttggactgcccttacaaatcggctcagacaaccggctggcgtttgtggctgacttggtacagaagagagcaaaggtattgggatcacatggaaactacatactacctactgaccacaaagttctggaaacgtggagtggatgaatcagactatcaaaaatagtttaggtgatcgggtgtggatcaaggattggaacgtagcccccttgcggccatggtggaaaagaccccagaccatcatcttgaccactcctacagttgtaaaggtagagggaatcccagcctggatccaccacagccatgtaaaacctgcagcacctgagacctgggaagcaagaccaagcccagacaacccttgcaaagtgactctgaagaagacgacaaacccttctccagtcacacccggaagctgactggtccacgcatggccaaagcataaggaaactcaccatgagactcattttccttaaattttgaacttgtacagtaaggacttcaactgaccttcctcagactgaggactgtacccagtgtatacatcaagtcactgaggtaggacaaaaggttgttgcagtcctattattttatagttgttatgagtgtaccgggactctaaaaggaacttgtttgtataatgctactctatacaaggtatgtagcccaggaagttaccagcctgatgtgtgttataacccatctgagccccctatgactaccgtttttgaaataagattgaggactggcagctggggaaaagctgatatgagtaaataactggaacagaagagaaaggagccccaaacaaattatcttaaaatttgatgcctgtgcagcaatcaacagtgacctgtatggaaataggataagatgtggctctctagattgggaaaggggctatatagtagaaaataagtatgtttgtcatgacttaggaatgtgtagtgatgaatgtagttactggtcctgtgtcatttaggccacctggaaaaaaagataagagggaccctgtccaccttcaaaaaggaaagagtaactcttcctgcactagtggtcattgtaacccattagaactactaattaccaatctccttgatccctgttggaaaacaggagagtacgtaactctaggaattgagggaactggactggatctccgagtaaatattttaatccaaggggaggtccacaggtgctttcccaaaccagtgtttcagaccttttacgatgaattgaatctgccagcaccagagcttccacacacacacacacacacacacacacacacacacacacacacacacacacaaagacaaagaacttgtttctccagttattaggaaatgtagctcattccctcaatgttacttcctgttatgtatgtgggggaaccactatgggagaccaatggccttgggaagcccgggaattggtgcctactgatccagttcctgacataattccagtccagaaggccctaattagcaacttctgggtcctgaaaaccttgattattggataatactgcatagctagagaaggaaaagacttcaccatccttgtaggaaggctcaattgtctaggacagaagctgtataacagcacaacagggacagtcacctggtggggtctaaaccatactgaaaagaatcccttcagtaaaattcctaaattacagactgcttaggtccatccagaatctcatcgagaccggacggctccctctggactatactggatatgtagacacagagcctacactccgtcacctgatcaatggggaagtagttgtgtcattggcaccattaagccatcccttttcctattgcccgtaaaaacaggtgagctcctaggtttccctgtctatgcctgagaaaagaggagcatatctataggaaattggaaagatgatgagtggccccccaaaaggatcatacagtactataggcctgccacacgagcacaagacggctcgtggggataccgaacccccatctacatgctcaaccagatcatacggttacaggccatattagaaataatcgctaatgaaactggcagagctttgactcttttagtccagcaggaaacccaaatgagaaatgccatctatcagaatagattggccttagactatttgctggcaactgaaggaggagtctgtggaaaattcaacttgaccaattgctgtctacaaatagatgatcaaggacaagtagttgaaaatatagagacatgacaaagccagcacatgtgcccatgcagatttggcataggtttgatcctggatctttgtttggaaaatggtttccagctctaggaggatttaaaactcttgtaataggcataataatagtgttaggacctgcatgttactcccctgtatgttacacatatttctccagttactaagaggcttcgttaccatcttagttcatcaaaacacctcagcacaagtatacatgaatcactattaatctgtctcacaggaagatctagatagtgaggatgagaatgagaactcccactagtgagtgaggttctcaaagggggaaatgaggagagaggctatttctcctactgtcctgtctccaaagaaaaggagaaagtaaaaactgaaaaataacagactgattggcgccactggccaggcctgtaggttaaagattaacccccaccccaaccgcttgtgctatccatagatcacagacaatggtatgaagaaatacttgccttcctcaccacccctacctagtcatgcagacaatggtatggagaaatacttgccttggtcaccaccccatctagtcgcgtaccccatgcttgctcaatctatcacaactttttcacgtggaccccttagagttgtaagcccttaaaagggccaggaaccctttcttcagggagctcggttcttgagatacaaatctgccaatgctcccagccgaataaagcctcttccttcttt

SEQ ID NO: 4440 - DNA, 3259 bp, Homo sapiens
gtgctcccatcgtcttctagggtaaccacggcgccactcgaacaagtgcggcaattcccaacgcttctcttctcagggggagttcgaatcctgtgagctttcaatatgacgtcgttcttgaagcctgagaatgctctgaaaagggcggaagaattaatcaatgttgggcagaagcaggatgctttgcagactcttcatgacctcatcacctcaaaacgatacagagcatggcagaagacacttgaaaggattatgttcaagtatgtggaactttgcgtcgacatgcgaaaaggccgttttgctaaagacgggttaattcagtataggattatatgtcaacaagtgaacgttagttcactggaggaggtcataaagcattttatgcagctttctaccgagaaagctgaacaggcccgtagccaggcacaggcactagaagaagcccttgatgttgatgatttagaggccgataaaaggccggaggacctgatgttgagctatgtcagtggcgagaaagggaaagacagatctgatcgggagactgttaccccctggtttaagtttctttgggaaacttataggacagtgctggaaatattgaggaacaactcaaagctggaagccttatatgctatgacagctcatcgagctttccagttctgtaagcaatataagcgaacaacagagttacgcagactgtgcgaaatcattagaaaccatttggctaatcttaataaatatcgtgaccaacgagaccggcctgatctttcagctcctgaaagcttgcaactgtatcttgatacaagatttgagcagctgaaaattgctactgaacttggactctggcaggaagccttcaggtcagtggaggatatacatggactgatgtgcttggtcaagaaaacacccaagccatccttgatggttgtttactatgtgaagctgacagaaatattttggatatcgtcaagtcatctgtatcatgcatatgcttggttcaagctctttttattacaaaaaagcttcaataagaatctgagtcagaaggatctgcaattaattgcttcatctgtcgttctggctgcactttcagtgcctcctcatgatcgaacccatggtgcatctcatttggaactggagcatgaaaaagagagaaatttgaggatggctaatctcattggctttaatcttgaaactaaacctgagagcagagaaatgctatcaagagcatcacttcttgctgaactggcatccaagggtgtgatgtcttgtgtaactcaggaagtgaaggacatttaccatcttttggaacatgagttttatccctcagatcttgcattaaaagcactgcccttaataactaaaatctcaaagttagggggcaagctttctactgcgtcatctgttccagaagtgcaattagctcagtatgttccagcactggaaagactggctaccatgaggttgctgcaacaggtgtctaatgtgtaccaatctatgaagattgagaccttatcagggatgatccccttctttgactttgctcaagtggaaaagatttctgtagatgctgttaagcagaagtttgtatcgatgaaagttgaccacatgaaaaatgctgtgatttttagtaaaaagagtctcgagtctgatggcttaagggatcacttgggcaattttgctgaacaattaaataaggcaagacaaatgatttatcctcctgatgggagaccatcaaaacttggagctttacttccaactttgacagaggttgtggccaaagaacacaagaggcttcttgctcgaaaatcaattattgagaagaggaaggaagaacaagaacgacagcttcttgaaatggaacgggaggaggagtcgaagaggctaagacttcagaaaataaccgaagaagcggaacaaagaaggcttgccactgagtatgaacagagaaagaatcagaggatccttagggagatagaggagagagaaaatgaagaagcacaagctttactccaggaagctgaaaagcgtattaaaaagaagggaaagaaaccaatcatagagggggacaaaataaccaagcagaccttgatggaattgactttgaccgagcaactccgggaaagacaggaaatggaaaagaaactccagaagttagcaaaaaccatggattatttggaaagagccaaaagagaagaggctgctcccctgattgaagctgcgtatcaacagcgtctagtggaagagagacttcttcatgagcgtgagcagcagcaagaggttgaactgagcaaacagaggcatgagggagatctcaaggagaaggagaggcttgttcgaatgatgggcaataaggaagtatatcaagcaagggtggttagtcaccgccaagcagagtttaacagattgagaagagaacgtgaagagcgaatctctaggattttacagtccaggagacaggagagggaaaaaatgaggaagttgaagtattatctcaagttagaagaagagagacaacaaaaattgcgtgaggcggaggaagctcggaaacgtgaagatgctgaaaggaaaaagaaggaagaggaggagcgcctgcgtaaattggaggagatagctgaaaagcagaggcagagagagagggagcttgaagagaaagagaaacaaaggagagaagcattgttgggtagagctgctgctgaaccagctcctcctgcccgtccattggaatcgggatctgctgctcctgcggcagctgccgccgccgccgctgctccaacacctgggaaatacgtacctaagttcaggcgagagagaaccgaaagcgcaggagctgcgcctcctccagaaacagatcgctggaacagtagcagcaggccagatggtgacaggtggcgaagtgatgatcggagaaccgcatttggttctggtggaggttcaaggtcatcttctacttggtcatcttccaggaatgcccgttgaacattttgtggcctgatttattgctggcgactttttgggagttctctttgtaccgagttcttaaatttattatctttttaatacttacgaagtcctctattggattggggagcctgccaacaaaattttctatttatgattgagtggattgcatatggtattcgaagtttcgattagacgagtacttccgaacaatttttctattttttgataatgttgagccttcgtagaaaatgaagggtaaccgtatactttattttctacgaaactttttgctgcc

SEQ ID NO: 4441 - DNA, 2884 bp, Homo sapiens
ctaaaactgttctctacttgagctgaagtgaaaagaccaaatatacgtttgactggtgttcctgaaagtgagggggagaatggatccaagttagaaaacactcttcaggatactatcgaggagaacttccccaatctagcaaggcagcccaacattcaaattcaggaaatacagagaacaccacaaagatactccaagaagagcaaccccaagacacataattgtcagattcaccaaggttgaaatggaggaaacaatgttaagggcagccagaaagagaggttgggttacctacaaaaggaagcctgtcagactaacagccgatctctctgcagaaaccctacaagccagaagggagtgggggccaatattcaacattatgaaagaaaagaattttcaacccggaatctcctatccagccaaactaagcttcataagtgaaggagaaataaaatcctttacagacaagcaaatgctgagagattttgtcaccaccaggctcgccttacaaaagctcctgaaggaagcactaaacatggaaaggaccaaccagtaccagccactgcaaaaacatgccaaatggtaaagaccagtgactctatgaaaaaactgcatcaattaacgagcaaaataaccagctaacatcataatgacaggatcaaattcaaacataacaatattaacctcaaatgtaaatgggctaaatgccccaattaaaagacagagaaaggcaaatttgataaacagttgagaaccatcagtgtgctgtattgaggagacccatctcatttgcaaagatgcacataggctcaaaataaaaggatggaggaagatctaccaagcaaatggaaagcaaaaaaaaaagcaggacttgccatcctagtctctgataaaccagactttaaaccaacaaagatcaaaagagataaagagggccactacatagtggtaaagggatcaattcaccaagaagacctaactattctaaatatatatgcacccaatacaggagcacccagatccataaagcaagtccttagagacctacgaagagacttagactcccacacaataataatgggagattttaacaccccactgtcaatattagacagatcaacgagacagaaggttatcaaggatatccaggacttgaactcagctctgcaccaagcggacctcatagacatctacagaactcttcaccacaaatcaagacaatatgcattcttctcagcaccacattgcacttattctaaaattggccacataattggtagtaaaacactcctccgcaaatgtaaaagaacagaaatcacagcaaactgtctcttagacacagtgcaatcaaattagaactcaggattatgaaactcactcaaaaccacacaactacatggaaactgaaaaacctgctcctgaatgactactgggtaaataacaaaatgaaggcacaaataaagatgttctttgaaaccaatgagaaccaagacgcaatgtaccagaatctctgggacacatttaaagcagtgtgtacagggaaatttatagcactaaatgccttcaagagaaagcaaggaagatctaaaatcgacacccctacatcacaattaaaagaactagagaagcgaaagcaaacaaattcaaaagctagcagaaggtaagaaataactaagatcggagcagaattgaaggagatagagatacaaaaacccttcaaaaaatcaatgaatccaggagctggttttttgaaaggatcaacaaaattgatagaccactagcaagactaacaaagaagaaaagagagaagaatcaaatagatgcaataaaaaatgataaaggggatatcaccaccgatcccacagaaatacaaactaccatcagagaatactataaacacctctacacaaataaactagaaaatctagaagaaatgtataaattcctgggcacataaaccctcccaagactaaaccaggaagaagctgaatctctgaatagatcaatatcaggttctgaaattgaggcaataaataatagcctaccaaccaaaaaaaagtccaggaccagaaggaatcagagccaaattctaccagaggtacaaagaggagctggtaccattcctcctgaaactatttcaatcagtagaaaagagggaatcctccctaactcattttatgaggctagctcatcctgttatcaaagcctggtggagacacaacaaaaaaagagaattttaggccaatatccctgaggaacattgatttgaaaatcctcagtaaaatactggcaaaccaaatccagcagcacatcaaaaagcttatccactatgatcaagtcagcttcatccctgggatgcaaggctgcttcaacatatgcaaatcaataaatgtaatccatcacataaacagaaccaatgacaaaaaccacatgattatctcaatagatgcagaaaaggcctttgacaaaattcaacagtgcttcatgctaaaaactctcaataaactaggtattgatggaacatatctcaaaataataaagagctatttatgacaaacccacagccaatatcatactgaatgggcaaaaactgaaagcattccctttgaaaactggcacaagacaaggatgccctctttcaccactcctattcaacatagtgttggaagttctggctagggcaatcaggcacaagaaagaatgaaaatggtattcaattaggagaggaggaagtcaaattgtctctgtttgcagatgatccctgattgtatatttagaaaaccccattgtctcagcccaaaatctccttaagctgataaggaacttcagcaaagtctcaggatacaaaatcaatgtgcaaaaatcacaaccattcctatacacc

SEQ ID NO: 4442 - DNA, 2102 bp, Homo sapiens
ttaggctcactgaggtttgtccaaagagattatgtattgtctgaaacagtttcttccgctgtgtgttacatgtggtctctcaatagtacctgtagttattgcccttatatacaaatgccctttattcttgagttgtaatatatttcttgtgacatgtgttactcctagtgttactgtccatctctgttctctgtataaacacaattctagtagcagcctgtgtcccacacctagtctgcccttcggttttgcttgtaatgtttttatatgtgtgagacaatctcctactgtatttttgccatgtggatcctgctttggaagcctgcagatgtctcttcctaccatatttctggccagcagcagagatcattgaagaacatggcttaggtttcaatgaggagaatgtgctgtgaaattttgttactattgttaggtatttttctggcaaatctggtaaaagctgcttggcggctgaacataccatccataaattagaaaggactcttgtttttttaggaacattaattttgctctagtgtcaaacgattgtgacagattctggctagataactcacataccctccaatgcagatttcatagtgtgtcttcaaatcctactgatggttataaacgagtggcaaagtttgatattgatagtttgggaattttagggcctcccggtgatacactgactcattaactgatttgttaatctagtttacaattatcaagtacccagggcatgagctactattctctgaatgctgggaggagcgacccatgattgttacagtcaaaggccatagtttgataatttcaaagtcatattataaagtcactttggttggtcttgtccacatatccagcctgcagtaaaaatgagccatgttaaaacttgaaagaggtagctttggtgggaaaagttaaagaattttgcatggtggaaatttgttgttctaggatgataattgtaagtggaatcaagaaggctttgattctactcacatactacccacaagaggaagttaggggtggacactgctgtgtgcagctttggtaggtggcagagaagctggcctgctgtcattgttactcctgttgtcagagccgatagctggactgaatctcccactcaaactgatgggagccagcagggcatttccatgtttttgtgaatatcttggtgatagattatgagtatttaatttcagaatattggtaatatattgcagaaagttgtgtgcagaaaattgacaattatttggcctttagtaaaaacttttactctttcaaaagttactattttaaagcatggtattattttgcattacaaaatggttttattttcttagtggtgagatagaggagaaatttgtacctgctcttctaatctgaaaagttgttttcaacttttacattacttccttgtttctttctattggttgagtgtaaataaaagtttcccattaccatgctgctttgaaattagaccatatattaatatttttcaagtattataacgggacatttcattctttttaaattatgttttgcagaaatccaggaaatttaaatactaattcatccttgttggtttccaggtgtttttagggcttttttttgtggaggtggggagggcactctccaatgagctgggaccagtgagttgcattcacccttcatttgtgctgaagaatgtagtcggtcccagcttgttagactcttcaatcttcataatgagattttgcttatgagttaggttttcaaagtgacatatttagaaattttgatattttgagatatttgaagaatcagtttaaactaggataatttttgatttgcatgctaacattatcaaaaatgtcccactttttaatttgtagcctaagtagtgatactcatgtgctttacaaaaataatcagattgactttcaaataggagagaagctcaccgctgttcctcatgtgtcactttccctgtgtccataaatagggccgccggcacttcaaccttgtacacctcatttatatgccatttgctgcctggatagacttacataatgaaataacctggttttttatgttccgtttcttgtatagtt

SEQ ID NO: 4443 - DNA, 2117 bp, Homo sapiens
atgcagagaagtccttaaaggacctgatggatctgaaaaccatggcatgagaactacgtgatgaatgcacaagcctcagtaaccgatgcgatcaactggaagaaagggtgtcagtgatggaagacgaaatgaatgaaatgaagcatgaagagaagtccttaaaggacctgatggatctgaaaaccatggcacgaggactacgtgatgaatgcacaagcctcagtaaccgatgcgatcaactggaagaaagggtgtcagtgatggaagacgaaatgaatgaaatgaagcatgaagagaagtttagagaaaaaagaataaaaggaaatgaacaaagcccctaagaaatatgggactatgtggaaagaccaaatctatgtctaattggtgtacctgaaagtgacggggagaatggaaccaagttggaaaacactctgcaggatattatacaggagaacttccccaatctagcaaggcaggccaacattcaaattcaggaaatacagagaacgccacaaagatactccttgagaagagcaattccaagacacataattgtcagattcaccaaagttgaaatgatggaaaaaatgttaagggcatcccaagagaaaggtgggttacccacaaaaagaagcccatcagactaacagctgatctctctgcagaaactctgcaagccagaagagagtgggggccaatattcaacattcttaaagaaaagaattttcaacccagaatttcatatccagccaaactaagtttcataagtgaaggagaaataaaatactttacagacaagcaaatgctgagagattttgtcaccaccaggcctgccctaaaagagctcctgaaggaagcactaaacatggaaaggaacaaccagtaccagccactgcaaaaacatgccgaattataaagatcatcaagactaggaagaaactgcttcaactaatgagcaaaataaccagctaacatcataatgacaggatcaaattcacacataacaatactaatcttaaatgcaaatgggctaaatgctccaattaaaaggcacagactgacaaattggataaagagtcaagacccatcagtgtgctgtattgaggaaacccatctcatgtgcagagacacacatgggcttaaaataaagggatggaggaagatctgccaagcaaatggaaaacaaaaaaaggaaggggttgcaatcctagtctctgataaaacaggctttaaaccaacaaagatcaaaagagacaaagaaggccattacataatggtaaagggatcaattcaacaggaagaactaactgtcctaaatatatgtgcacccaatataggagcacccagattcataaagcaagtccttagtgacctgcaaagtgacttagactcccacacaataataatgggagactttaacaccccactgtcaacattagacagatcaacgagacagaaagttaacaaggatatccaggaattgaacacagctctgcaccaggcagacctaatagacatctacagaactctccaccccacatcaacagaatatacattcttttcagcaccacacctattccaaaattgaccacatagttggaagtaaagcactcctcagcaaatgtaaaagaacagaaattataacaaactgtctctcagaccacggtgcaatcaaactagagctcaggattaagaaactcactcaaaaccgctcaactacatggaaactgaacaacctgctcctgaatgactactggctacataacgaaatgaaggcagaaataaagatgttctttgaaaccaacgagaacaaagacacaacataccagatctctgggacacattcaaagcagtgtgtagagggaaatttatagcactaaatgcccacaagataaagcaggaaagatctaaaattgacaccctaacatcacaattaaaagaactagagaagcaagagcaaacacattcaaaagctagcagaaggcaagaaataactaagatcagagcagaaccgaaggagatagagacacaaaaaaatccttcaaaaaaatcaatgaatcccagagctggttttttgaaaagatcaacaaaattgattgaccgctagcaagactaat

SEQ ID NO: 4444 - DNA, 1807 bp, Homo sapiens
gagaggctaaacctaaaacccttacctttccttcccgccctcataatgagggacacaaactgagagtgaaatgcagaaactgctacgcccttcttcagttcccttcctctctatctctgtcaccgtggctactccctttctttcgttgcctcccaaagttgcaaaccaaccaatgtcagcagctgctgctggttcttctctcaagcgccaactctcttattcccgctatttggcgctctctagtaccaacacttgctctgtctgcaggtgtctcagtctaacccacacccactcccaccccaagaataacaagacccttcttctccttaaccactctagaaaccgctccttgcattcggcttcagaaggctctttcatcacccaacccgaccctgttgagtatggttctcttgtggactcaaaagagaagccctttaactccaggctaaataggaggcaaaagggttctacttcttcttctcctgctccgtcaaatcctgatttgctggccatccccggtgtgggtcccagaaatttcagaaagctcgttcagaaaggtatcgctggtgttgcgcaactcaagcaactctacaaggataagagtgttgacgaggaggagttggaagacaattcctcttcctctgttcagaagaagcgcttaacattctgtgttgagggtaacattagcgttggcaagactaccttcctccagagaatagcgaatgaaacgatcgagttgcgtgatcttgttgaggtggttcctgaacccattagcaagtggcaggatgttggacctgatcactttaacattttggatgctttttatgccgagccgcaacggtatgcctacacctttcagaactatgtgtttgtcacacgggtcatgcaggaaagagagtcatctgctggaatcaagcctcttcgtttgatggagaggagtgttttcagtgacaggatggtttttgtacgagctgtccatgaagctaactggatgaatgggatggagatcagtatctatgactcgtggtttgatcctgtagtatcctccttgcctggacttattcctgatggttttatctatcttagggcaagtcctgacacttgccataagagaatgatgttaagaaaaagaacagaagaaggtggagtcagccttgactatctctgcgacctccatgaaaagcatgaaagctggttatttccctcccaaagtggtaatcatggagtattatctgtcaatcagctgccccatcatattgacaactctttacaccctgatataagagaccgcgttttttatctggagggtggtcacatgcattcaagcattcagaaggttcctgctttggttctggactgtgaacccaatattgatttcagcaaagatatcgaagcaaagaggcaatatgcacgccaagttgcagaattttttgaatttgtgaagaaaaggaatgaggtctcatccaaggaaggaagtagccaagcccaaccgcaggtgctgctacctcatgagggtggcctgtggctaccagatgggaagccttttccccgggaagctctcaaatctttggacttcagacaagcagcaacgtcattcatgtccggctagtgactgctaaaccttgtgattcagggcaaagctatactactaatgtccccttgttgatgtgttcacgtttttcttgcatgtaaagattgactccggaccttgactgatgtaaaatagtggtggtatttgtggttgcgtaacgctttgctgacacacactacttggtcgtagattatatactcttgttgctgtgattag

SEQ ID NO: 4445 - DNA, 2291 bp, Homo sapiens
gtgtcaaaaggatgatcttttccaataaagtcttaagtctttaaaaaaaaaaccttaactgctgaatgtgcctcaattaatataatagataatattcttgagagttatggaagatggatgtaccagaaaacttccctctctcctcctcttttttgagacagggtccctgtttccgaagctggaatgcagtggcatggtcacagcgtcaaccacttgggcttaggcagtcctctcacctcagcctttccagaggctggcactacaagcatgtgtgcctggctactttttaaaaaattttttgtagagttggagtctatgttgcccatgctggaggacttcctgttaaggaaaatccttattaaatgtttttctagcaagaataaatactctcattcatttttatttgtaggtactgattttcataaatatttgtgattgatgttgcatgtaccttttcaagaacttttctgataaagcgctagattccttagtgtaataatactggtatagccaaggtgtgtgttaattaactggctctgtttccatttcaaatgataatttgagatgaaaatagatggatttcagaattgattattgatgtaatagaaacaaggtgtagctgtttgggcactttttgtttagggtttatttttactgctgtgttggcaaaatactgaaatgcagaagatggatgtgtcccagaaaagaagatggtaattatggggaagcatctgctgtgatatagttatgtttgtatgtgttacatctatcactgtaataattgtaagcaaagacagagagttttgtcttcattttgtgatggatggctctttcctttgcagccaaacagggaaaaagttaatggcgaagtgtcgaatgcttatccaggagaatcaagagcttggaaggcagctgtcccagggacgtattgcacaacttgaagcagagttggctttacagaagaaatacagtgaggagcttaaaagcagtcaggatgaactgaatgacttcatcatccagcttgatgaagaagtagagggtatgcagagtaccattctagttctgcagcagcagctgaaggagacacgccagcagttggctcagtaccagcagcagcagtctcaggcctctgccccaagtaccagcaggactacagcttctgaacctgtagaacagtcagaggccacaagtaaagactgcagtcgtctgacaaacggaccaagtaatggtagctcctcccgccagaggacgtctgggtctggatttcacagggagggcaacacaaccgaagatgactttccttcttctccagggaatggtaataagtcctccaacagctcagaggagagaactggcagaggaggtagtggttacgtaaatcaactcagtgcggggtatgaaagtgtagactctcccacgggcagtgaaaactctctcacacaccaatcaaatgacacagactccagtcatgaccctcaagaggagaaagcagtgagtgggaaaggtaatcgaactgtgggttcccgccacgttcagaatggcttggactcaagtgtaaatgtacagggttcagttttgtaatattttttcagcaaatttttatacagtgtcatttaatttgggagaggatactgtccagaaaattaatgcatacttttgtcacaatttgcctttttgtgggtgtacgttttggtttttttttgttgttttttttctttgttttttttttcttttctttttttttttttttttttttttttgcttcaatacttctgccgctttggaaattgtaacagttaattactttgaatgttgctaaaaggacattttgtgtagggtcaagttatttttatatgagttaatgtgaaattgtaaatggaaatttttccttaaaatacaacacaatgatgtctgtataaatctgtctgtttagaatctgtgctgtgtaagggcattcgtactcatgctgttactgtacttatgcaccattcagacttgttagagtagatgtgggtttatgactgccaagtttgcccagtacagtagttttttatcactaaaagttggactcattgatggagtcctgtagtagtttcagtgttagatacagttttttccaccatacatctgtgcattttctctttaggtgactgtttaagaaatttgtgtgcatagttactcagtttttatgaactgttgtatcctgttaatgcatattgctctgtgactccagtatatcttacctgtactgaccaaacctaaataaagatttttattgtaaaaaaaaaaac

SEQ ID NO: 4446 - DNA, 1950 bp, Homo sapiens
gttgttcatacgatacctgtaagtaagctgcaacgaaggaagagcagagaaatggcggttgggcaacttgttccttcgaatttgttcctcaatcattctgctgctacaacactcatacccacttccactccccccagacacagacaccttctctgtatttcttctgccaatcacacaaccgcaaccgataacgattctccattcccaagtttcggaagagtgaagactctcctggtccacagaagaagaaaggaccaaagccatagacgcgccgttcaacttgaagatgataatgatgatgatatagcccctagacccagacgttctcagtctcggtcacgaggaggagaaagatgggatatgattcccaattatactccacaaagcaaatcagcgactgacacaaagtttttcagtctaaagtccttcaaagaaataggttgcagtgaatatatgattgaatccctccagaaactcttgttgagccggccttcccatgtacaggccatggcttttgcacctgttattagtggaaagacttgtgtcatagctgaccaaagtggttctggtaagacattagcttatctcgcaccaatcatccagctccttagactagaagagcttgaaggacgtagtagtaaatcctcttcacaagctcctagagtccttgtcctcgcacccacggctgagttggcttctcaggtcttagataattgccgctccttgtctaaatctggagttccattcaagtctatggttgtcaccggaggttttcgccaaaaaactcaattggaaaatttacagcagggagttgatgtcttaatagctacacctggccgtttcttgttcctcatccatgaaggcttcttgcagttaacaaatctaagatgtgctatcttggatgaggtagatatactctttggtgatgaggacttcgaagtggctcttcaatccttgatcaattcttcacctgtagacacacagtatttatttgtgactgcaactttaccaaaaaatgtttacaccaaattggttgaagtttttcctgattgtgaaatgattatggggcctggtatgcaccgaataagttctcgccttcaagagattatagtagattgcagtggagaagatggacaagaaaaaactcctgatacagcatttctgaacaagaaaactgcacttctgcagcttgtggaggaaaatcctgtcccaagaactattgtgttctgcaacaaaattgaaacatgcagaaaagttgaaaatttgttaaagcgttttgatagaaaaggaaatcacgtgcaagttctaccattccatgctgccatgacacaagaatcacggcttgctagtatggaagagtttacacgttctccatcaaaaggagtctcccagtttatggtttgcaccgacagagcatcacggggaatagacttcacaagagtggatcatgtcatactctttgacttcccacgtgatcccagtgaatatgtacggcgtgttggaagaacagccagaggtgccaagggagtaggcaaggcatttatctttgtggttggcaagcaagtatcccttgcacgcaaaataatggaaagaaatcagaagggtcacccactacatgatgtgccttcggcttattagccggtgaagtagaaagttgagtgagtgcttactctcaactcgaatgctgaaacatattgagtgagctagcagctgcttaaccacttctctcttcccaaaccaccttattcagatccatagtttgcttattagtaacatacgcagaaggtggtttgcactttgcaacacttgtagcaaaagcatgacctacattaattatctactttcaagtatgaaatggaagattgacttaggtccattttttcccatcgtagtttgcaaaatgcaaacattaactcgtttaattgtcaatgaaactagcaagacaagaag

SEQ ID NO: 4447 - DNA, 2153 bp, Homo sapiens
gacaaggtgctgtggtctgtcttacgatgggcagtgaagcctgagcagaccattaataatcagcatcaaggccgcgagtcagccttttggaatgtgtggtttgtctttcatgctgtttagagcgtgcttaaagatggatcttggtgtttttatttgtgtatttatttctttctctccccttttcaaatccacagcagactgtccagatgctgtgccttcctccgctgaaacagggggaacgaattatctggcccctggggggctttcagattcccaacttcttctggagcctggggatcggtcacactggtgcgtggtggcatactgggaggagaagacgagagtggggaggctctactgtgtccaggagccctctctggatatcttctatgatctacctcaggggaatggcttttgccttggacagctcaattcggacaacaagagtcagctggtgcagaaggtgcggagcaaaatcggctgcggcatccagctgacgcgggaggtggatggtgtgtgggtgtacaaccgcagcagttaccccatcttcatcaagtccgccacactggacaacccggactccaggacgctgttggtacacaaggtgttccccggtttctccatcaaggctttcgactacgagaaggcgtacagcctgcagcggcccaatgaccacgagtttatgcagcagccgtggacgggctttaccgtgcagatcagctttgtgaaggggtggggccagtgctacacccgccagttcatcagcagctgcccgtgctggctagaggtcatcttcaacagccggtagccgcgtgcggaggggacagagcgtgagctgagcaggccacacttcaaactactttgctgctaatattttcctcctgagtgcttgcttttcatgcaaactctttggtcgttttttttttgtttgttggttggttttcttcttctcgtcctcgtttgtgttctgttttgtttcgctctttgagaaatagcttatgaaaagaattgttgggggtttttttggaagaaggggcaggtatgatcggcaggacaccctgataggaagaggggaagcagaaatccaagcaccaccaaacacagtgtatgaaggggggcggtcatcatttcacttgtcaggagtgtgtgtgagtgtgagtgtgcggctgtgtgtgcacgcgtgtgcaggagcggcagatggggagacaacgtgctctttgttttgtgtctcttatggatgtccccagcagagaggtttgcagtcccaagcggtgtctctcctgccccttggacacgctcagtggggcagaggcagtacctgggcaagctggcggctggggtcccagcagctgccaggagcacggctctgtccccagcctgggaaagcccctgcccctcctctccctcatcaaggacacgggcctgtccacaggcttctgagcagcgagcctgctagtggccgaaccagaaccaattattttcatccttgtcttattcccttcctgccagcccctgccattgtagcgtctttcttttttggccatctgctcctggatctccctgagatgggcttcccaagggctgccggggcagccccctcacagtattgctcacccagtgccctctcccctcagcctctcccctgcctgccctggtgacatcaggtttttcccggacttagaaaaccagctcagcactgcctgctcccatcctgtgtgttaagctctgctattaggccagcaagcggggatgtccctgggagggacatgcttagcagtccccttccctccaagaaggatttggtccgtcataacccaaggtaccatcctaggctgacacctaactcttctttcatttcttctacaactcatacactcgtatgatacttcgacactgttcttagctcaatgagcatgtttagactttaacataagctatttttctaactacaaaggtttaaatgaacaagagaagcattctcattggaaatttagcattgtagtgctttgagagagaaaggactcctgaaaaaaaacctgagatttattaaagaaaaaaatgtattttatgttatatataaatatattattacttgtaaatataaagacgttttataagcatcattattcatgtattgtgcaatgtgtataaac

SEQ ID NO: 4448 - DNA, 1979 bp, Homo sapiens
aatccatgcaggccctcagtaccgtgcctcttgactgggtcaccgttcctaagctacaagaatgtggggccaggcctgcaatggagaagcccacccgggtcgtgggcgggttcggagctgcctccggggaggtgccctggcaggtcagcctgaaggaagggtcccggcacttctgcggagcaactgtggtgggagaccgctggctgctgtctgccgcccactgcttcaaccacacgaaggtggagcaggttcgggcccacctgggcactgcgtccctcctgggcctgggcgggagcccggtgaagatcgggctgcggcgggtagtgctgcaccccctctacaaccctggcatcctggacttcgacctggctgtcctggagctggccagccccctggccttcaacaaatacatccagcctgtctgcctgcccctggccatccagaagttccctgtgggccggaagtgcatgatctccggatggggaaatacgcaggaaggaaatgccaccaagcccgagctcctgcagaaggcgtctgtgggcatcatagaccagaaaccctgtagtgtgctctacaacttctccctcacagaccgcatgatctgcgcaggcttcctggaaggcaaagtcgactcctgccagggtgactctgggggccccctggcctgcgaggaggcccctggcgtgttttatctggcagggatcgtgagctggggtattggctgcgctcaggttaagaagccgggcgtgtacacgcgcatcaccaggctaaagggctggatcctggagatcatgtcctcccagccccttcccatgtctcccccctcgaccacaaggatgctggccaccaccagccccaggacgacagctggcctcacagtcccgggggccacacccagcagacccacccctgggctgccagcagggtgacgggccaacctgccaactcaaccttatctgccgtgaacaccactgctaggggacagacgccatttccagacgccccggaggccaccacacacacccagctaccagactgtggcctggcgccggccgcgctcaccaggattgtgggcggcagcgcagcgggccgtggggagtggccgtggcaggtgagcctgtggctgcggcgccgggaacaccgttgcggggccgtgctggtggcagagaggtggctgctgtcggcggcgcactgcttcgacgtctacggggaccccaagcagtgggcggccttcctaggcacgccgttcctgagcggcgcggaggggcagctggagcgcgtggtgcgcatctacaagcacccgttctacaatctctacacgctcgactacgacgtggcgctgctggagctggcggggccggtgcgtcgcagccgcctggtgcgtcccatctgcctgcccaagcccgcgccgcgacccccggacggcacgcgctgcgtcatcaccggctggggctcggtgcgcgaaggaggctccatggcgcggcagctgcagaaggcggccgtgcgcctcctcagcgagcagacctgccgccgcttctacccagtgcagatcagcagccgcatgctgtgtgccggcttcccgcagggtggcgtggacagctgctcgggtgacgctgggggacccctggcctgcagggagccctctggacggtgggtgctaactggggtcactagctggggctatggctgtggccggccccacttcccaggtgtctatacccgggtggcagctgtgagaggctggataggacagcacatccaggagtgaccaccacgtgactgcccaggccgagactctacgtgaaagcaacaggagcagcaggccacccaacaccccaccccaccgtaccctacccaaggacgggtgtgggggggctgtgggtcatgggcatgcattttggtaccaccctttgttccaaggtcatggggatgcattttggtaccaccctttgttccaataaacacagcccctccaccct

SEQ ID NO: 4449 - DNA, 1954 bp, Homo sapiens
ctttgatgctgtccggcgacgtatgagtgtaattgtgaagactcaagaaggagacatacttctcttttgtaaaggagcagactcggcagtttttcccagagtgcaaaatcatgaaattgagttaactaaagtccatgtggaacgtaatgcaatggatgggtatcggacactctgtgtagccttcaaagaaattgctccagatgattatgaaagaattaacagacagctcatagaggcaaaaatggccttacaagacagagaagaaaaaatggaaaaagttttcgatgatattgagacaaacatgaatttaattggagccactgcagttgaagacaagctacaagatcaagctgcagagaccattgaagctctgcatgcagcaggcctgaaagtctgggtgctcactggggacaagatggagacagctaaatccacatgctatgcctgccgccttttccagaccaacactgagctcttagaactaaccacaaaaaccattgaagaaagtgaaaggaaagaagatcgattacatgaattattgatagaatatcgcaagaaattgctgcatgagtttcctaaaagtactagaagctttaaaaaagcatggacagaacatcaggaatatggattaatcatagatggctccacattgtcactcatactaaattctagtcaagactctagttcaaacaattacaaaagcattttcctacaaatatgtatgaagtgtactgcagtgctctgctgtcggatggcaccattacagaaagcccagattgtcagaatggtgaagaatttaaaaggcagcccaataactctgtcgataggtgatggtgccaatgatgttagtatgatcttggaatcccatgtgggaataggtattaaaggcaaagaaggtcgccaagcagctaggaatagcgattattctgttccaaagtttaaacacttaaagaaactgctgttggctcatggacatctatattatgtgagaatagcacaccttgtacagtacttcttctataagaacctttgtttcattttgccacagtttttgtaccagttcttctgtggattctcacaacagccactgtatgatgctgcttaccttacaatgtacaatatctgcttcacatccttgcccatcctggcctatagtctactggaacagcacatcaacattgacactctgacctcagatccccgattgtatatgaaaatttctggcaatgccatgctacagttgggccccttcttatattggacatttctggctgcctttgaagggacagtgttcttctttgggacttactttctttttcagactgcatccctagaagaaaatggaaaggtatacggaaactggacttttggaaccattgtttttacagtcttagtattcactgtaaccctgaagcttgccttggatacccgattctggacgtggataaatcactttgtgatttggggttctttagccttctatgtatttttctcattcttctggggaggaattatttggccttttctcaagcaacagagaatgtattttgtatttgcccaaatgctgtcttctgtatccacatggttggctataattcttctaatatttatcagcctgttccctgagattcttctgatagtattaaagaatgtaagaagaagaagtgccaggagaaatctgagctgtagaagggcatctgactcattatccgccagaccttcagtcagacctcttcttttacgaacattctcagacgaatctaatgtattgtaacagaatccgaatcttgaactgcctatgttattgtcctacaagcatactgacagtggttacagctaaaaaagaaagcatgaagaaacaactacaaaaagttatcatctcaggatacttgatatgcaacacactaaaccactctcatgtctagagttcacaataaatgttcattaaaatacc

SEQ ID NO: 4450 - DNA, 3755 bp, Homo sapiens
tctatctatctatctatctaatctatctattcttctatggccttctagttttcctgaaatatagctcttggatgatatttcccatgcttgacaattcagacggaatacacctcagcttcccaagtagctgggaccacaggcatgtgccaccatgccctgctaatttttgtattttttgtagagacagggtctcgccacgttgcccaggctggttgggaattcctgggctcaagcgatccacttgctttgacctcccaaagtgctgggagtacagatgtgagccaccgcacccagcatgtattttaaatgttttataatgaacacatattacttttaaaatcaggataagacaaaactaaaaaaccttgtttatgtataaaaggcatagctgagaacgtgaacatgatgcaggtaactcactccgacctcatttgttgcaggcccaggtgttttcagccacacctttgacaaggtgaacactaaagcagggcggactccagctgcgtgatcctggtgaccaactcctttctctgacagtcacttcttggatggagttgctgccaatggctttggccacggggacccagacagtcaagaggcctgctgcaaccctgaagagtcctcccacagtctggctccaggaccacaacattggcacactcctttctacctggctttgttttctgtgtgtgttttgtaggtagcctggtagactcgtctggtcatatcctggtccctggaatctatgatgaagtggttcctcttacagaagaggaaataaatacatacaaagccatccatctagacctagaagaataccggaatagcagccgggttgagaaatttctgtccgatactaaggtatggccacagactgatggataagctggaagaggcatgaggctagtatatcatatttgccctctgtctaagtcattgtctggtgctaatctccgtatcttagaatccaaagcagatgtgaattcccaggcatatttttgacattcacagccacttccccgtgggctggatcaaccagtcctttttcaatggcgtctaattggcactggcttctggcacttaaccacaagcagttacccatttcccagccatgttttccaaagctgttcattaacctaaatcccacgtcagccttcagccagtgagctggacttcttaccttttcaaagaccaagaaaagtctgagatgattccagctccaagacctctaactgttcatttttccagacaaaaccaagagccttaggggctaatctgtaagtgaatacatcattgtctcagtggactaagtaaacacaaagctgaaaacattccttacaggcaaatttcgaattgttttgcttttctcttcttcctctttctgggcagcatgcttgcctgacaaggtgtttggtagctagggctggttcctggggaaggggccgagagggggaaaagcaagctgaaaagaagcggtagagtgaattattatgaagcaggcatcttcttgcagaccagctccaggatggccagaagaaagaaaatggcttaaacatctgaagagttatttgatgtcttctgaataagaaaatgctttcattacataagttattattgtaatttggggttagaaatttataattgaacccacgtttctgaaagggctcctttatctatggccataccacactgaacgtgcccgatctcgtttgaaagggcccctttgccatttgttaactgaaaactgcagatcttgggcaaagaggggcactcatcaatggggagcattggtagtgatgggtagtgaaggcatctgaggacagcagagagtttgtgtcctgaggaaaaagtccttgcgtgaggcacagctgagtaaggtgacagttaacgtgtcctgaatggtgtctcagagaggcagagggtggtaacacaagcaacccaggtccactgggttctaattaagcatcctttggataattttattttaatataggaggagattctaatgcacctctggaggtacccatctctttctattcatgggatcgagggcgcgtttgatgagcctggaactaaaacagtcatacctggccgagttataggaaaattttcaatccgtctagtccctcacatgaatgtgtctgcggtggaaaaacaggtgacacgacatcttgaagatgtgttctccaaaagaaatagttccaacaagatggttgtttccatgactctaggactacacccgtggattgcaaatattgatgacacccagtatctcgcagcaaaaagagcgatcagaacagtgtttggaacagaaccagatatgatccgggatggatccaccattccaattgccaaaatgttccaggagatcgtccacaagagcgtggtgctaattccgctgggagctgttgatgatggagaacattcgcagaatgagaaaatcaacaggtcagctgatgcctgtgcaatgtgcctctctcttcttcctttactgcacacacccgggtctacacgtgggtgagctcctgttcaatttatatgagaatggaaaatcgtccagactgggagcttaaagaacagacattcattcctcacagttctggagcctggatgccctagatcaggtgccaggccatttggttcctggtgggtatgggctgtcttcctggccgtccctgcgatggcggggttaggtggttctggtgtctctctttttataagagcaccagacccattggattaggacccccattttaacctcatttaacctttattatctcctccaggccctgtctccaaatacagacacactggggggttaggggttcaacacaggactttgaggaaacacaaatgtttatttagtgcataacaaaaaaggctattaggaatgtttgctttatgcgctactggcagatactacaagatctcctaagcatcccagactactgagaaacaagaaattgtttgaccctgatatccatatcagtgataagaaatcaaggaaaattcacttttggatttgagtctaggactgattctcatcttcttaataataataatgcaattttcacatggaacttactaagtgcttttcatactgggatctcagaagtatgttaaataatttaaatggaatttataacatcaaatcttcctgtctaaatgacagaatatttttcctccttcatttgaatggaaattgtaacaaaatttctctttgtttttcctcttcttaggtggaactacatagagggaaccaaattatttgctgcctttttcttagagatggcccagctccattaatcacaagaaccttctagtctgatctgatccactgacagattcacctcccccacatccctagacagggatggaatgtaaatatccagagaatttgggtctagtatagtacattttcccttccatttaaaatgtcttgggatatctggatcagtaataaaatatttcaaaggcacagatgttggaaatggtttaaggtcccccactgcacaccttcctcaagtcatagctgcttgcagcaacttgatttccccaagtcctgtgcaatagccccaggattggattccttccaaccttttagcatatctccaaccttgcaatttgattggcataatcactccggtttgctttctaggtcctcaagtgctcgtgacacataatcattccatccaatgatcgcctttgctttaccactctttccttttatcttattaataaaaatgttggtctcc

SEQ ID NO: 4451 - DNA, 4728 bp, Homo sapiens
agccacactgcctgcctggtgcagcccatgtgacgggtcgagctccgggccctgctgtccctggccgggctatcccagtggcttcaggcaccttctccagacctacccagaaagatgcccggatggatcctgcagctccgtggcttttctgggaagcagcggcccctgctctcaagagaccctggctcctgatggtggccccaagtgcagctcctcaagtccacagacgtgggccggcacagcctcctgtacctgaaggaaatcggccgtggctggttcgggaaggtgttcctgggggaggtgaactctggcatcagcagtgcccaggtggtggtgaaggagctgcaggctagtgccagcgtgcaggagcagatgcagttcctggaggaggtgcagccctacagggccctgaagcacagcaacctgctccagtgcctggcccagtgcgccgaggtgacgccctacctgctggtgatggagttctgcccactgggggacctcaagggctacctgcggagctgccgggtggcggagtccatggctcccgacccccggaccctgcagtgcatggcctgtgaggtggcctgtggcgtcctgcaccttcatcgcaacaatttcgtgcacagcgacctggccctgcggaactgcctgctcacggctgacctgacggtgaagattggtgactatggcctggctcactgcaagtacagagaggactacttcgtgactgccgaccagctgtgggtgcctctgcgctggatcgcgccagagctggtggacgaggtgcatagcaacctgctcgtcgtggaccagaccaagagcgggaatgtgtggtccctgggcgtgaccatctgggagctctttgagctgggcacgcagccctatccccagcactcggaccagcaggtgctggcgtacacggtccgggagcagcagctcaagctgcccaagccccagctgcagctgaccctgtcggaccgctggtacgaggtgatgcagttctgctggctacagcccgagcagcggcccacagccgaggaggtgcacctgctgctgtcctacctgtgtgccaagggcgccaccgaagcagaggaggagtttgaacggcgctggcgctctctccgcccggcgggggcggcgtggggcccgggcccggtgcggcggggcccatgctgggcggcgtggtggagctcgccgctgcctcgtccttcccgctgctggagcagttcgcgggcgacggcttccacgcggacggcgacgacgtgctgacggagctgtgcgcccccgacggcgcgcccccgggcgtggttccggtgctcagcgcgcacagcccgtcgctgggcagcgagtacttcatccgcctagaggaggccgcacccgccaccggccacgaccctgactgcgccggctgcgcccccagtccacctgccatcgcggaccaggacgacgactctgacggcagcaccgccgcctcgctggccatggagccgctgctgggccacgggccacccgtcgacgtcccctggggccgcggcgaccactaccctcgcagaagcttggcgcgggacccgctctgcccctcacgctctccctcgccctcggcggggcccctgagtctggcggagggaggagcggaggatgcagactggggcgtggccgccttctgtcctgccttcttcgaggacccactgggcacgtcccctttggggagctcaggggcgcccccgctgccgctgactggcgaggatgagctagaggaggtgggagcgcggagggccgcccagcgcgggcactggcgctccaacgtgtcagccaacaacaacagcggcagccgctgtccagagtcctgggaccccgtctctgcgggcggccacgctgagggctgccccagtccaaagcagaccccacgggcctcccccgagccggggtaccctggagagcctctgcttgggctccaggcagcctctgcccaggagccaggctgctgccccggcctccctcatctatgctctgcccagggcctggcacctgctccctgcctggttacaccctcctggacagagacagccagtagtgggggtgaccacccgcaggcagagcccaagcttgccacggaggctgagggcactaccggaccccgcctgccccttccttccgtcccctccccatcccaggagggagccccacttccctcggaggaggccagtgcccccgacgcccctgatgccctgcctgactctcccacgcctgctactggtggcgaggtgtctgccatcaagctggcttctgccctgaatggcagcagcagctctcccgaggtggaggcacccagcagtgaggatgaggacacggctgaggccacctcaggcatcttcaccgacacgtccagcgacggcctgcaggccaggaggccggatgtggtgccagccttccgctctctgcagaagcagtggcctcaacgagaagaatccctaccgagactctgcctacttctcagacctcgaggctgaggccgaggccacctcaggcccagagaagaagtgcggcggggaccgagcccccgggccagagctgggcctgccgagcactgggcagccgtctgagcaggtctgtctcaggcctggggtttccggggaggcacaaggctctggccccggggaggtgctgcccccactgctgcagcttgaagggtcctccccagagcccagcacctgcccctcgggcctggtcccagagcctccggagccccaaggcccagccaaggtgcggcctgggcccagccccagctgctcccagtttttcctgctgaccccggttccgctgagatcagaaggcaacagctctgagttccaggggcccccaggactgttgtcagggccggccccacaaaagcggatggggggcccaggcacccccagagccccactccgcctggctctgcccggcctccctgcggccttggagggccggccggaggaggaggaggaggacagtgaggacagcgacgagtctgacgaggagctccgctgctacagcgtccaggagcctagcgaggacagcgaagaggaggcgccggcggtgcccgtggtggtggctgagagccagagcgcgcgcaacctgcgcagcctgctcaagatgcccagcctgctgtccgagaccttctgcgaggacctggaacgcaagaagaaggccgtgtccttcttcgacgacgtcaccgtctacctctttgaccaggaaagccccacccgggagctcggggagcccttcccgggcgccaaggaatcgccccctacgtcccttagggggagccccggctctcccagcgcccccaaccggccgcagcaggctgatggctccccaaatggctccacagcggaagagggtggtgggttcgcgtgggacgacgacttcccgctgatgacggccaaggcagccttcgccatggccctagacccggccgcacccgccccggctgcgcccacgcccacgcccgctcccttctcgcgcttcacggtgtcgcccgcgcccacgtcccgcttctccatcacgcacgtgtctgactcggacgccgagtccaagagaggacctgaagctggtgccgggggtgagagtaaagaggcttgagacctgggcagctcctgcccctcaaggctggcgtcaccggagcccctgccaggcagcagcgaggatggtgaccgagaaggtggggaccacgtcctggtggctgttggcagcagattcaggtgcctctgccccacgcggtgtcctggagaagcccgtgggatgagaggccctggatggtagatcggccatgctccgccccagaggcagaattcgtctgggcttttaggcttgctgctagcccctgggggcgcctggagccacagtgggtgtctgtacacacatacacactcaaaaggggccagtgcccctgggcacggcggcccccaccctctgccctgcctgcctggcctcggaggacccgcatgccccatccggcagctcctccggtgtgctcacaggacacttaaaccaggacgaggcatggccccgagacactggcaggtttgtgagcctcttcccaccccctgtgcccccacccttgcctggttcctggtggctcagggcaaggagtggccctgggcgcccgtgtcggtcctgtttccgctgcccttatctcaaagtccgtggctgtttccccttcactgactcagctagacccgtaagcccacccttcccacagggaacaggctgctcccacctgggtcccgctgtggccacggtgggcagcccaaaagatcaggggtggaggggcttccaggctgtactcctgccccgtgggccccgttctagaggtgcccttggcaggaccgtgcaggcagctcccctctgtggggcagtatctggtcctgtgccccagctgccaaaggagagtgggggccatgccccgcagtcagtgttggggggctcctgcctacagggagagggatggtggggaaggggtggagctgggggcagggcagcacagggaatatttttgtaactaactaactgctgtggttggagcgaatggaagttgggtgattttaagttattgttgccaaagagatgtaaagtttattgttgcttcgcagggggatttgttttgtgttttgtttgaggcttagaacgctggtgcaatgttttcttgttccttgttttttaagagaaatgaagctaagaaaaaag

SEQ ID NO: 4452 - DNA, 3037 bp, Homo sapiens
atgtagaattagtaaagtagttgcccttcccagtgtgagcgggcctcatccaatccattaaatcccaaataaaacacaagggtagaggaagagagaattcactctctttgatgctttcagagctgagacatagatcttctctcgcctttgaagtcagacgtggactgtaacttacgccatcagctttcctggttctcaggactttaggcttggactggaactccaccattggcagtcctgggtctccagcttgctgactgcaggtcctgggacttgtgagcctccataactacatgagccaattccttataataaacctatatatattcatgcaactggaaatattttgttgttatatatttagctaacatgatctttttgggcctattttaacagagtcgcagtcatagcctgccttcatctctgaagggaccaggtaacacacggagtgccttggcagcctcatcattgcatgcaatcttcacagacaatatctcactgcagccacctttctgcaggagtacaggtgtgacattatactgatgacatcattctcagagaaaattcattttacacactgaagatacacagacacaaagagccttatacaaagggaatggacctttccccaacacagtagtgcaaggccctgccactttgcttcaattcctgaaaattccttggtaaacttggggctgctctattcctgacactttcaagaaatagttattcatcctctcagcatccacaacgttaatacaagcccaacattctctaatttgtgttttgttttttggagacacagtcttgctctgtcacacaggctggtatgaagtggcatgatctcagctcactgcagccttgacctcccgacctcaagcaattctcccatttcagctttccaagtagctaggactacaggtgtgtgccacgacactcagttaattttgtttatttttttgtagagaaaagctctcgctttgttacccgggctggtctcgaactcctgggctcaagagatcctctggcctccgcctcccaaagttctgggattacaggtgtgagtccatgtgcccagccctttaattctttacttggggttcaggtgactacatatttcttacttacaaattttacttaatctcgctgatgctgtcacttgaaagctgacccaccttgaatgaagcctcctccaacaagtctggaatccatccgaatttaaattaacaggcgctcctatgaattccatcagagaacacacagtagatgctttagcaacctcttcccatgcctccgaagtatctggtttgcattgtggtggccattagtcatccatgggcttctgatgtaaaaaacaaacctgcctcttttggccctgtgctgtacagcatcagggcagtgattgctggccacatactggacccttgaaacagagggctctgcatccatgtccatgagccttcatgcccatctggccatcaggccttgggaagcagcaccccacagctttggcacagctgcagtgacctccttgcctccgaatggagtcaaatgtgtacacgctgcaattctcatctgcaggaagcactggcctccttcatccttaggctatagtgctgacactggcctccttcatcctcagactgtggtgccggatgtcacccctctgcgaggcccttgggatcgactgagtgaccagcagtgaagttcgtcagccttctgaatggatgccatgatcagatgtgatggagctcagtgggatgctgctgctttccctcccttagctaggatgtccctgataaaggatgacacccaagcctcagcacaactggccaaacttgaggtggtcatcatagcactgatgctgggccaacaattagccccatttgtacctttttacaaactttttgacaattgccaagaatcgtccaccttccctccccattgaattaaatacacttcttgtctcatggatactcagaataccaatcaaggtaacagatgcctttattttaactaaggacacagtacagatctcacagggacactccttatcccttgcagagttccagacactactgatggtcaccaaagcaacatttcatcagaaaacacagtgctgggcttgtgaagaaggtgtccagcagagcttccactgcccctgtaggctgcaggcagctgcttcagttgagagatacactgagctcctcaaagaattcctatttaaggtacaaagcagcgactggatgccctgctggattccactattgccacaggctttgataactctaagttcatgctccttaggaaagtgcactttttacaccaatgttagacagttccctcagttgcctttactggacatcaaggagttcacatttttgacaatctttcagtcctgaactgtccaaggggtggaggtagctccatacaggaagctgcctgctgcgtgtggatcagtaatatcagacttgcccaacagctcactggagacatcaaaaccaatgcatgggggatgcatgacgtcacccaaatatttaccacacgcttttgctgccagagaccccagatcacttttcctgcctcctgctaaacaaatgggagcagtagcttctcatcagcctccacatttcattactcataattgtggccttcctaatgtctcatgcccctaagcacttattacaatgtctcaacagccttctctcagcctctcaaaatattagtcatcattaaaataaatgtctgatgttaaagcatcagggtcaattgtactgtgacacctaaaatttcatgctgcatcccaccaggtcctcagcctaatggctttcatgcccccaacagactgctaaactctttgaattagtcaagcatatccctcaagggacaaggggttaccccaccctctgatttctaccaagcctgcctcccgcaccctgtgctccagagtgaacccccgggtagacctgcacagatgcagtgtcatcccctgttgggctgagtatgcgagatgaataaattacggtgaatttcgtct

SEQ ID NO: 4453 - DNA, 2954 bp, Homo sapiens
atatgatctccagtaggattcttcacaaacagagaattaagactacattatgaatatttagtggttttgaaagttaaacagctggcaagctttggggagcattaggaataatatacattacaggatgggagggaggaacataccaactcactactcaagggaagagaactgtgaaagaatggaatgggtaggttgaacaatttcagacttttagatgtatattacacatgtaagctccatgaggccaactgtttttattttgttagccattgtatcacaagtatttgggacagttcctggcctataatagatgcttggcgaattgtttatggaatgaattttgggtgtaacacatgacaaagaaaaactaaatacaagtcaacaaatgtcagtttttacagttgtttcatggtcttttttttttaccaatgtgaagttatcagtaccagactattttgcttcaatctgcaaaaggaaggtgtgtgaaggtgtgtgtgactctcaaagagtgaatgccctaatagtccattttggaggccatgttttcaagtgaactgattgatgagctgcaagcttctgtctggctaatttagaaacatctaggaccagcttctggttaagcagttgtggtacatgaaattcattgtataggtgattcgtgcaacagcttctgaattttttcctccttcacccaccttacagccattagtcctataataatttaatttgggtttgttggtatagaaactgtatttgcacaataatgataaagccactcaggctcatctagtcatttcctggatttatgtgtgtaggagtacataaaaataagggcactgattcgttttgtacttgtctaaaattgttattcttcagttgttcaaaggtacacaaaatgcttttttctttataaggtaaaaaatacttggaggttataagaaataactcttaactagcttactttgagtggctttgatatgtatttactcataatggaattcatgagctttccttctttcgcttggccaagattttttttttctttgaaattccttctccggtgttatctaggatgtttgcattacaagcaggccgctttacctcctttgttcgttgtcacaggtgaaaagccatacaagtgtacctgggaaggctgcgactggaggttcgcgcgatcggatgagctgacccgccactaccggaagcacacaggcgccaagcccttccagtgcggggtgtgcaaccgcagcttctcgcgctctgaccacctggccctgcatatgaagaggcaccagaactgagcactgcccgtgtgacccgttccaggtcccctgggctccctcaaatgacagacctaactattcctgtgtaaaaacaacaaaaacaaaaaaaaaacaagaaaaccacaactaaaactggaaatgtatattttgtatatttgagaaaacagggaatacattgtattaataccaaagtgtttggtcattttaagaatctggaatgcttgctgtaatgtatatggctttactcaagcagatctcatctcatgacaggcagccacgtctcaacatgggtaaggggtgggggtggaggggagtgtgtgcagcgtttttacctaggcaccatcatttaatgtgacagtgttcagtaaacaaatcagttggcaggcaccagaagaagaatggattgtatgtcaagattttacttggcattgagtagtttttttcaatagtaggtaattccttagagatacagtatacctggcaattcacaaatagccattgaacaaatgtgtgggtttttaaaaattatatacatatatgagttgcctatatttgctattcaaaattttgtaaatatgcaaatcagctttataggtttattacaagtttttttaggattcttttggggaagagtcataattcttttgaaaataaccatgaatacacttacagttaggatttgtggtaaggtacctctcaacattaccaaaatcatttctttagagggaaggaataatcattcaaatgaactttaaaaaagcaaatttcatgcactgattaaaataggattattttaaatacaaaaggcattttatatgaattataaactgaagagcttaaagatagttacaaaatacaaaagttcaacctcttacaataagctaaacgcaatgtcatttttaaaaagaaggacttagggtgtcgttttcacatatgacaatgttgcatttatgatgcagtttcaagtaccaaaacgttgaattgatgatgcagttttcatatatcgagatgttcgctcgtgcagtactgttggttaaatgacaatttatgtggattttgcatgtaatacacagtgagacacagtaattttatctaaattacagtgcagtttagttaatctattaatactgactcagtgtctgcctttaaatataaatgatatgttgaaaacttaaggaagcaaatgctacatatatgcaatataaaatagtaatgtgatgctgatgctgttaaccaaagggcagaataaataagcaaaatgccaaaaggggtcttaattgaaatgaaaatttaattttgtttttaaaatattgtttatctttatttattttgtggtaatatagtaagtttttttagaagacaattttcataacttgataaattatagttttgtttgttagaaaagttgctcttaaaagatgtaaatagatgacaaacgatgtaaataattttgtaagaggcttcaaaatgtttatacgtggaaacacacctacatgaaaagcagaaatcggttgctgttttgcttctttttccctcttatttttgtattgtggtcatttcctatgcaaataatggagcaaacagctgtatagttgtagaattttttgagagaatgagatgtttatatattaacgacaattttttttttggaaaataaaaagtgcctaaaag

SEQ ID NO: 4454 - DNA, 3023 bp, Homo sapiens
aaaagtgccgagattgcagcctctgcccggccgccaccccgtctgggaagtgaggagtgtctctgcctggccgcccatcgtctgggatgtgaggagcccctctgcctggctgcccagtctggaaagtgaggaacgtctccgcccggccgccatcccatctaggaagtgaggagcgcctcttcccagccgccatcacatctaggaagtgaggagcgtctctgcccggccgcccatcgtctgagatgtggggagcgcctctgccccgccgccccatctgggatgtgaggagcgcctctgcccggccgagaccccgtctgggaggtgaggagcgtctctgcccggccgccccgtctgagaagtgaggagaccctctgcctggcaaccaccccgtctgaaaaggtagacaacctcagcgtgttgcagattccctgcaaggggagttagacatctgagtcctagaccgagataccagctgaaggaacgctgcctggcgaaccctggtgttcaagttccagaggaacgggatgagctcctgagatggaagatctgtcctctccagactccacccttctccaagggggacataatctactctcatcagccagttttcaggaagcggtgactttcaaggatgtgatagtggactttacccaggaagaatggaaacagctggaccctggccagagagatttgttcagggatgtgacattggaaaattatacacacctggtctctataggactccaagtttctaaacctgatgtgatttcccagttagagcaagggacagagccatggatcatggagccaagcattccagtaggtacctgtgcggactgggagacaagacttgaaaatagtgtgtcagccccagagcctgacatttctgaagaagagctatctccagaggtaatagtggaaaaacacaaaagagatgattcttggagttccaacttgctagaaagttgggaatatgaaggcagtttagagagacagcaggcaaaccaacagacactgccaaaggaaataaaggtaaccgaaaagacaatacccagttgggaaaaaggccctgtaaataatgaatttgggaaaagtgtcaatgtgagttcaaaccttgtaacacaagaaccatctccagaagagacctctactaaaagaagcatcaaacagaattcaaacccagttaaaaaagagaaatcttgtaagtgcaatgaatgtgggaaagcctttagttattgttcagctcttattcgccatcagagaacacatactggagaaaaaccctacaaatgtaatgaatgtgaaaaagccttcagccggagtgaaaaccttataaaccatcaaagaattcatactggagataaaccatataaatgtgatcagtgtggaaaaggcttcattgagggtccatctcttactcaacatcaaagaattcatactggagaaaaaccatataaatgtgatgaatgtgggaaagcctttagtcagaggacccatcttgttcagcatcagagaattcatactggcgagaagccatacacttgtaatgagtgtggaaaagcctttagccagagaggccactttatggaacatcagaaaattcatacgggagaaaaaccttttaaatgtgatgaatgtgataaaaccttcaccaggagcacacaccttactcaacatcaaaaaattcatactggagaaaaaacctataaatgtaatgaatgtggaaaggccttcaacgggccctcaacttttatccgtcatcatatgattcatactggtgaaaaaccgtacgaatgcaatgaatgtgggaaagccttcagccagcactcaaacctcactcagcatcaaaaaactcatactcaagagaaagcttatgaatgtaaagaatgtgggaaagcttttattcggagttcatctcttgctaagcatgaaagaattcatactggagagaaaccctatcagtgtcatgaatgtgggaaaaccttcagttatggttcatcccttattcagcataggaagatccatactggagaacgaccttacaagtgtaatgagtgtgggagagcattcaaccagaacatacaccttacacagcataagagaattcatacaggagccaagccttatgagtgtgctgagtgtggtaaagcctttcgacattgttcatctcttgctcaacatcaaaaaactcacacagaagaaaaaccctaccagtgtaataaatgtgaaaagacctttagccagagctcccatctaactcagcatcaacgaattcacactggggagaagccctataagtgcaatgaatgtgacaaagcctttagccggagcactcatctgactgaacatcagaatactcatactggagagaaaccttataactgtaatgaatgcagaaagacttttagccagagcacatatctcattcagcaccagagaattcattcaggagagaagccttttggatgtaatgattgtggaaaatccttcagatatcgctctgctctcaacaaacatcagagactgcatcctggcatatgacaattctaggaacatcataaatttaggggagatatttactttagtttgtccttttgttaagtactgaagaatcagagtggatttagaaactgccttgaaatcttttaaattttcactatcatgttatggaatggaaagtacattgggctgaactaatccaattgttattaagccactctgtgacattagaaaactctactgttttaagctttagtttcctttatggaatgaaggatttggagtagattatttcaaaggtagtttggagttttataatcagttttgtatatttacaatattttcttgaatgggtttactatacatcagcattttgctgtgttgcatctagaatgtgtatgtttatgcatgttttgccaatagaatttgtgcttcagtaactagatcggggatctagtatgctcctggtctaatgcatttacattgtttaggtaactggttcctaataaaaagaattataaaat

SEQ ID NO: 4455 - DNA, 2360 bp, Homo sapiens
gtccctcaaagtttgtgtctggagccgtagcggcaagtgggcttgcggctaagggattttcctgggatgagagcgggtcttctgccttcattttggatgcacatcccgctttagccccggcagcctttggtccggctcgtgtccctggggattctcggatctccgaggacaccggacgggagcgcttggccatcctctctccggcagaggagcagacgtttgctttccaagtgcaaaactacagacacgcgcgcgcacacacgcaagcacacgcggagagagaggaaccttgccggtccgaggcagctctgcgcgtcccctcctgcgcttagcatcctcggcccagcgcggcccgcaccgccatggaggtgctggagagcggggagcagggcgtgctgcagtgggaccgcaagctgagcgagctgtcagagcccggggacggcgaggccctcatgtaccacacgcacttctcagaacttctggatgagttttcccagaacgtcttgggtcagctcctgaatgatcctttcctctcagagaagagtgtgtcaatggaggtggaaccttccccgacgtccccggcgcctctcatccaggctgagcacagctactccctgtgcgaggagcctcgggcccagtcgcccttcacccacattaccaccagtgacagcttcaatgacgatgaggtggaaagtgagaaatggtacctgtctacagacttcccttcaacatccatcaagacagagccagttacagacgaaccacccccaggactcgttccgtctgtcactctgaccatcacagccatctccaccccgttggaaaaggaggaacctcctctggaaatgaacactggggttgattcctcgtgccagaccattattcctaaaattaagctggagcctcatgaagtggatcagtttctaaacttctctcctaaagaagccccagtggaccacctgcatttgccgcccacccctccgagcagtcacggcagtgactcagagggcagcctgagtcccaacccacgcctgcaccccttcagcctgcctcagacccacagcccctccagagctgcaccccgggccccctccgccctctccagctcccctctcctcacggctcctcataaactgcagggatcaggccctctggtcctgacagaggaggagaagaggaccctgatcgctgagggctatcccatccccaccaaattgcccctgtcaaaatcagaggagaaggccctgaagaaaattcggaggaagatcaagaataagatttctgctcaggaaagtaggagaaagaagaaagaatacatggacagcctggagaaaaaagtggagtcttgttcaactgagaacttggagcttcggaagaaggtagaggttctagagaacactaataggactctccttcagcaactccagaagcttcagactttggtgatgggcaaggtttctcgaacctgcaagttggctggcacgcagactggcacctgcctcatggttgtggtgctgtgctttgccgttgcattcggcagcttctttcaaggctacgggccctatccttctgccaccaagatggctctgcccagccagcattccctgcaggagccctacacagcctccgtgggtaagacagcatgtggcaagttgggcagggtcttgttttatttccctagagctgggtttctcagtcttccaaaaggaatcttctgtgaaagtccaatgtttaaaaagtggtaaaagtggagcttctccctttgaagaggcaagtgggggttcccctggggcccctcatccactggactgcggcatcactgggaattctccagagcttgacagagcacagtttgcaaactgctgttctagactgtgttccctgatccattctgacatctaatttttgagttctgataagggagagggaagcagatgagggaaagagtctgtcgctttctgtgacgttttaagagaactgctgtgtttctgcctccactgagtggaattgtatgagtaatgtaatgcaatgtatatagtaagggcttgtaaagtgaaattaaataaacagcaaggtcagggccgggcgtggtggctcacgcctgtaaccccagcactttgggaggccgaggcgggcagatcacgaggtcaggagattgagactatcctggctaacactgtgaaaccccatcgccactaaaaaatacaaaaaaattagccgggcgtggtggcaggtacctgtagtcccagctactggggaggctgaggcaggagaatattgtgaacctgggaggcggagtttgcagtgagccgagatcgcaccactgcactccagcctagacgacagagcgagactccatc

SEQ ID NO: 4456 - DNA, 3419 bp, Homo sapiens
aaaatttgggggtggaagaggcttctgcgttgttccttacccgcaacgatgaccatggctttgccttctttaaaattgaggcctccaactctgacgctgactggagaattgaaacccgaacacacattgggctcttttggcacttgactagagctaaaacctcgggattcagcgggcaagcgttgctgtggcctgcgggggtgatcatgaagccaggtgctgccccagcacaagttcgacagcaagtccctggaggcctacctaaaccagcacttgtctggctttggggccgaacgtgaggctacgctgaccattgcccagtacagagcaggaaagtccaatccaaccttttatctccagaagggctttcaaacatatgtgctcaggaaaaaaccaccaggttcacttcttcctaaagcacatcagattgatagagaatttaaagtccagaaagccttgttttcaattggattccccgttcccaagcctatactgtactgcagtgatacttctgtcattggaacagaattttacgtaatggaacatgtgcagggtcgaatcttccgtgatttaacaattcctggacttagcccagcagaacgttcagccatatatgtggccacggtagaaacattggctcagttacattccttgaatatacagtcactgcagctggaaggatatggtataggtgctgggtactgcaaaagacaggtatcaacctggacaaagcaatatcaagctgcagctcatcaggacatccctgccatgcaacagctatcggagtggctaatgaagaacttgcccgataatgacaatgaagagaatttgattcatggagatttcagactagataacatagttttccaccctaaagagtgtcgagttatagcagtgctggattgggagctgtcaaccattggtcatcctttgtcagacttagctcatttttccctgttctacttttggccaaggacagttccaatgataaatcaaggttcttatagtgaaaactcagggataccatcaatggaagaactgatttcaatatattgccgctgcaggggaattaattctattcttcctaactggaatttctttcttgccctttcatattttaagatggctggaatagcacagggagtatatagcagatatcttctgggaaataattcatctgaggatagctttttatttgccaatattgtgcaacctctggcagaaactggactacaactctccaaacgaactttcagtactgtactaccacagattgatactactggacagttgtttgtacagactcggaaaggtcaggaagttcttattaaggtgaagcatttcatgaaacaacacattcttccagctgaaaaggaggtaactgagttctatgttcaaaatgaaaattcagtggacaagtggggaaaacctttagtgattgataaactcaaggaaatggccaaagtcgagggtctctggaacttgtttttgccagctgtcagcggactcagccacgtggactatgccttgattgctgaagaaacaggaaaatgcttttttgctccagatgtctttaactgccaagcaccagacacagggaatatggaggttctgcacctgtatggaagtgaggaacagaagaaacagtggcttgagcctcttcttcaagggaacattacctcttgcttctgtatgacagaacctgatgtagcttcaagtgatgccacgaatattgaatgcagcatccaacgagatgaagatagctatgtaattaacggcaaaaaatggtggagcagtggagctgggaatcccaagtgcaaaattgcaattgttttgggaagaactcaaaatacttctctctccaggtaattaaacaattctggttgagaaacctgtgtaggaatgagccagtcttcctcctatctaggtaatttacttaaaattcactgtttggactcacaaatcataatgtaagatatgagagtaaatgtcatatatttgtatttcacaagtattttctaacaggtgtttttggaaaacattatagggagtattgctgaacattcttcgctgtggaattttcagtattagaaagtgttgctaaattatcaaagctgtttggattaaattatcagacaaattttttcagacctgtgtaatgaagtgattagatgtttagatcaaaggcaataatcttgaaatgtttaattatatatataagttcccagttaccattgttgagcagtgagaagcttcaatcaaacaactcatttattttcaaatcattgtttctgttccagatcacagcctgcatcagactatgttggtgtacgtcttttacacagttcccattccagtcatcactgcttacatgactacatgaaaacatcaaaaagacaattgtgattctgcttattatctgttttatttttcttcttagcaaactttttctaatacaatttttcttttgactagacacaaacagcacagcatgattcttgttcccatgaacacacccggagtaaaaataataaggcctttgtcagtttttggctacacagataattttcatggaggacattttgagatccattttaatcaagtgcgagttcctgccacaaatctaatactaggtgaaggtaggggatttgaaatttcccaaggccgccttggacctggcagaatccaccactgtatgagaacagtaggtttggcggaacgcgctttgcagatcatgtgtgagcgggcaacacaaaggatagctttcaagaagaagttgtatgcacatgaggttgtggctcactggattgctgaaagccgcattgccattgagaagatccgcttgttgactctgaaagctgctcacagcatggacactctgggcagtgctggcgctaagaaagagattgcaatgatcaaagtggctgccccacgggctgtcagcaaaatcgttgactgggccatccaggtgtgcggaggtgctggtgtttcccaggattaccctctggctaacatgtatgctataacccgagttttgcgtttagcagatggacctgacgaagttcatctttcagcaatcgcaacaatggagctgcgggaccaagccaaaagactgacagccaagatataaggagggtggcactgccacatcccactggcagaaactctcctttatacaaacttcattggctccaacatttgaatctcatatttttgtagcagtttgagcacagggttaattattcatttgtggtaaagattatagcatctattttgatcagtgggttttattatttcaagggtcacacagggttaagttcagtaagaaatgctgtagctgttgtcattcaatctagtgcctccttgaggccaggagttcaggaccagcctgggcaacatagcgagacccccattgctac

SEQ ID NO: 4457 - DNA, 3499 bp, Homo sapiens
gagaaagcgcgagacacgccggcgcgtgcagctccgcggccgccgcttcgccctagctctagccccgcgccacccgcagcccgcccgcgaacgcccgccccggttatttatgcggcggccgcgtccgctggctgcggcttcctcggcccccccccccccccgggcgcgccccccactcgcggcagcagctgcccggactcgcgcgtgggtgtgttgtttgggggcttctgcctcgccgccgcgggtgccacctcccgggacgctgcccacggcgtccccggtcgcggtctactctaatgtgatgctgggattgaattttcctaggactccgtttcaaggttaattcgaaagtcttgtggaagatctggaagaaacaggtattaagtcatgatgcaggaatctgcgacagagacaataagcaacagttcaatgaatcaaaatggaatgagcactctaagcagccaattagatgctggcagcagagatggaagatcaagtggtgacaccagctctgaagtaagcacagtagaactgctgcatctgcaacaacagcaggctctccaggcagcaagacaacttcttttacagcagcaaacaagtggattgaaatctcctaagagcagtgataaacagagaccactgcagccatgagacagacttgtggttcttcaacagctgtgcagagcagagacgtaaatttaaggaattgcttccagaaacaaaattatgtatctgtggccactcttctggtgatgggcatcctcacaacacatttgcagtgcctgtgtcagtggccatgatgactccccaggtgatcacccctcagcaaatgcagcagatccttcagcaacaagtcctgtctcctcagcagctacaagcccttctccaacaacagcaggctgtcatgctgcagcaggattttttggattctggattggaaaatttcagagctgccttggaaaaaaatcaacaactacaagagttttacaagaaacagcaagagcagttacatcttcagcttttgcagcagcagcagcaacagcagcagcagcaacaacagcagcaacaacagcagcagcaacaacaacaacaacagcagcaacaacagcagcagcagcagcaacagcagcagcagcagcaacagcatcctggaaagcaagcgaaagagcagcagcagcagcagcagcagcaacagcaattggcagcccagcagcttgtcttccagcagcagcttctccagatgcaacaactccagcagcagcagcatctgctcagccttcagcgtcagggactcatctccattccacctggccaggcagcacttcctgtccaatcgctgcctcaagctggcttaagtcctgctgagattcagcagttatggaaagaagtgactggagttcacagtatggaagacaatggcattaaacatggagggctagacctcactactaacaattcctcctcgactacctcctccaacacttccaaagcatcaccaccaataactcatcattccatagtgaatggacagtcttcagttctaagtgcaagacgagacagctcgtcacatgaggagactggggcctctcacactctctatggccatggagtttgcaaatggccaggctgtgaaagcatttgtgaagattttggacagtttttaaagcaccttaacaatgaacacgcattggatgaccgaagcactgctcagtgtcgagtgcaaatgcaggtggtgcaacagttagaaatacagctttctaaagaacgcgaacgtcttcaagcaatgatgacccacttgcacatgcgaccctcagagcccaaaccatctcccaaacctaaattgccccaaactatgaattttataaaaatgcagatgtcagacctccatttacttatgcaactctcataaggcaggctatcatggagtcatctgacaggcagttaacacttaatgaaatttacagctggtttacacggacatttgcttacttcaggcgtaatgcagcaacttggaagaatgcagtacgtcataatcttagcctgcacaagtgttttgttcgagtagaaaatgttaaaggagcagtatggactgtggatgaagtagaataccagaagcgaaggtcacaaaagataacaggaagtccaaccttagtaaaaaatatacctaccagtttaggctatggagcagctcttaatgccagtttgcaggctgccttggcagagagcagtttacctttgctaagtaatcctggactgataaataatgcatccagtggcctactgcaggccgtccacgaagacctcaatggttctctggatcacattgacagcaatggaaacagtagtccgggctgctcacctcagccgcacatacattcaatccacgtcaaggaagagccagtgattgcagaggatgaagactgcccaatgtccttagtgacaacagctaatcacagtccagaattagaagacgacagagagattgaagaagagcctttatctgaagatctggaatgagaactgacttgtgaaacctcagcgtgaagggacatatcactgaccttcataaccactccacaaccatgaatatttgacaaatttttactgtgactatttattaagcatggataaaggagacagccctaaaggaacttactaagccagccctttgggattcagtaccaacaggcaaattgcttgttttcttcttcttcttcttcttttttttttttttttttttagaaaaaaagacaaaaactgattttcttgaaaaaaaaaaatgaactgttctttctataatggctttgcccatttaaaaaatgtggctcttaagggttcatgaaatgactgaatatgaggatacatgtcctgtagaaagcaaatgcgcctcatatactgccaaaaatagtgttagtttcattaatgtgaattttccagcattcagtagttgtaatgttagaaacaattgctggtcaagttcaacttgttgctattgtttttaatttgcacaggagtagtatcagaaattagtgtcactgcttgtatctagctgaattttaaacaacagaacattagttttttatgttggtgccaccaactgtaaatgacataagttagttattacaaaacacagtaattagactgttgcaaccatctaaaaccttaggcttccagtctgtgctgttagtgttaagatgtaaagtgcaatcctaagctaacattatctgtgcaagcaccatagaaacatttgcatatctgcatagatcttacaactgtactctttacctccttgtgataaagctttgtctacctgcaaacacagtcaaaggctacagctgcaaaccaaagccaactctaaccatggccaagagctcaaggacagaagcagccacatgctttggtcagccttctgtaacttcaattagtacaaaggaaccttttccatgaactacctgctgttttctgatgacctctgggatcttttcatttagccctaaac

SEQ ID NO: 4458 - DNA, 2474 bp, Homo sapiens
agtctccgcagccgcctgcaagcgggcgggggcggggtgtgaggcgctgcggacggggttgcgggctcggtagcggcagcttcagggcgcgagcgcgggcggtgccgaccactgcaggtaacagaggcgctgcgagggcagccgcggccctgtggagatgaggaaattgaggcacagagattaactaatctgaaccagataatgccataagtagtagaactgcgatgcaaacttggacagtctgactccagagtctgcgcacttaaccactccactattctggccttctacaagatgcagtgcctggcacacagtgatggctcagtaaatgtttgaataaattccaaaagatgagtcgtggatattcagaaaacaacaatttcctgaacaataataaccaaatggtattggacatgatcctttatccattaattggaatccctcagactatcaactgggaaactatagcaaggctcgtgcctggattaacaccaaaagagtgtgcaaaaaggtttgatgaattaaagagcagtggaagctcgcctgttgacaaccagtataattccctaatggctgctggagagagtcctgttgaaactttagccacatatatcaaatcctcacttcttgacatacatggagaatttcaggagactccagttggacatgatgcagtttccaaaactggaagacatagtatagcttccacaaggaattgttcttcagaaagtgaaaattgtactactcataatggtggagaaatgactgaagaatctgaagggccaaacatggtgatccatgtgtgtgatgaagcaaaaaacttgaaagaagattttacttgcccgcgagatcttttgatatcagaaatgaagtactttgctgaatatttatctatggatgcccagcgctgggaagaggtggacatttcagttcattgcgacgttcacattttcaactggttgataaaatacattaaaaggaacactaaggagaataaagattgtgagatgcccactttagagccaggaaatgtcatttcaattcttatttcttcggagtttttaaaaatggattcactagttgaacagtgtattcagtattgccacaaaaatatgaatgccatagtagctaccccatgcaacatgaactgtattaatgcaaatcttctcacacgtatagctgatctgttctcacacaatgaagttgatgatttaaaggacaaaaaagataaatttaaaagcaaacttttttgtaagaagattgaaagactgtttgatcctgagtacttgaatccagattctcggagtaatgcagcaacattgtatagatgctgtttgtgtaagaaacttttaacaaaagaaacagaaagaagaattccttgcattcctggaaaaatcaatgtggatcgacgtggaaatattgtctatattcacataaggtgtcgtgaagataaaatacatacatgtatttttgtatatatatatatatagttgttgttgttgttttggagacggagtcttgctctgtcacccaggctggcgtgcagtggtgtggtcttggctgactgcaaccttccgcctcccaggttcaagcgattctcctgcctcagcttcctgagaagctgggactacaggcgtgtgccaccacacccagctagtttttgtatttttagtagagatggagtttcactgtgttggccaggctggtctcgaactcctgacctcatgatttgcccgccttggcctcccaaagtactgggattataggtgtgagccaccgctcccagcccagattttttttaaatgtgaatttctagcatatttataaaaatataactacttttataaggaatgggataacatcttttctgcatgttatccaactttcatttagaaaaatactttctaaacaaggtagttgttagtacattttatttactgggtaagtgtcataatgttttacacattaaaatgataaaaattattgtatattaatcttgaaaggtattctggttagtgcctttaaaatgctctcttttcactaacagattttagttatctgtacaaatgttatattgaattttacaagagaaccaaatttactttcaggtaaattttggtgaggaaaattgtctttagcattggattttctgtcatctatttgttcttcatactttgtcagtatttcattaatatgtaggccgggcacggtggctcacacctatagtcccagcgctttgggaggccaagtcaggtggatcacctgaggtgaggagtttgagaccagcctgaccaacatggtgagaccccgtctctactacaaaaaactagttgagcatggtggtgggtgcctgtagtctcagctacttgggaggctaaagcaggggactcgcttggacccaggaggcagaggttgcagtgaaccgagatagtgccactgcactccagcctggtgacagagcaagactccatctg

SEQ ID NO: 4459 - DNA, 2804 bp, Homo sapiens
atgcaatatatgattgatttcagaaaacgagatataaaacagcagatatcaatctcgcttatgtaaaattcttttctttatattcacacgtcaatagagataggtctcagaggatcttcagtaaaaaatattaatggtaggatttcagaaaaattatttctgaatttgaaaaaactttttcgagatagagtctcgctgtgttacccaggctagactacagtggcacaaacatggctcaccgcagcctcgacctcttggactcaagctatcctcccacctcagcctctcatgtagctgggatcacaggcatgcaccaccacggccagctaatttttttactttttgtacaaatggggttttgccacgttgcccaggctagtcttgaactcctgggcctaagtgatccacctgccttggcctctcaaactgctgggattacaggcatgagccaccgcaccaggctcaaatgaacttctaaaatcactttgcctgggatatgagccggtggccgtgttagtgtttcaatgaagtgattttattttaggtcaatcttttgtacacactttatagtccataaaaaaataaaataaaaagtgagggggccctcatttactgtatgtttctcttgctgaaaaaaaaacaagttaatagttcaagattaaaatgcaaggattccattaacattcctatggaagattttaaaatgtttgtttttacagaaatataacatgaatttcttgagtaaacaggctattcccagagagttacatgtcagggtagcttttcatttggaaactgatttgcctaggaatatacatgtgtgttttatagaaaataatgcacaaatacattcttattgtcaaagatttaaaccctacagaacccccacagtgtgttggtatcttccctccactttccccgattcatgcctctcttctttacccgcttccaccctgctctgggcccccttgccctctctcttcttgctgggtttgctgctgggagtctgcaggcgataggaaggacagaggagaaaggggtcagggtactaacttcccaagcccccccttacagagtcatgggccagctgcattcctctaccaaaggtttcagcttctgccagggggtgtgcccaagagctctttctctctgggtcaccacgcctctcttcctccctcccagcccaaggctagccatggtgcccaccgtttcttgtccagggtactgtccatcatgtttctctgtatcctgtctatgctttacaactggtccttcatcaaattctgcttaaatggcccaatttgatgtcttatctgtttactctccaccctgactgatctgtacctaattcggaccagaaaaagaaagtccgctgctcactcctgttctcattccctcacaagtaaacacggcgaacagcttagctcacccttctcaccctcctttccatgcctgtcatcaggtttcactgaggaacctggaactggatgcgactctgttctgggccatgcagcagggcatgagagtgtcataagttccctgttttcttgccttggccaaaacccagcttatcatgataagatagggaaggattgtcttgacagggctgtgaagaaagtaccgccatttgtggtgtccccaagtggctgattgtttccatttccacagactgtccgtcattttctgcctgtttcctcactctgacctgcaggagtggcccagctcgagctgctgtgtccaaactcacagggcccagggtgccacctgtcggatgcttcctgggcctcagccacgcctcactattctgggtcactttgccaaaacattgtcattcagtttatctgccttcttgaccgttttccccaagatatcattaagagctctgagaatatttgcttgataacaaaaagagagtgaaaactagaagagaagaaaacccttctgatttatgccccataaagtagaagtacttcaagggtagaaacttttctattaagaaaaagagaagccttaaaatcatttttagtagatttatatttcatgctcattgcaaaatcctcagtatacctccatgtacaatatatatggcagaaagcaaaagttcccctaaaatcctatttcctaggataaaattccctattaagtatcaagtttgtcatttgagaacctttctaggtatatgtaaaatatgtctatgaaactttttacatacataggattgtctgtagtttctgttctataatctgctttcattagagagtggacaactttttgtgccaattcataaggatttacttgatccttttatcagccacataatattccataatacaaatgtatcatgctatcctatggaaagccatctgcttttttcctataacaacactgcagtgagtattcttgtacataggtttttcaatatttgcatcagtaaatttctaaaggtaatttcctgggataggaataggaatggaataggaatctccaagtcatagttgttacaaatgttttatggttatgaatttagacatttgagactttattttggaaaaaaaacatgaagaataacaaatttatatttccatcttcttttctcctgagtttctaactcatacctgtctgttcacattacgtcttaacttggttgcctactaaattctagttgcatagatgaaactcatttatgccaaggcaccatggcacacacctgtaattccagcactttgggaagctgaggcaggaggatggcttgagcctgggagttcaagatgatcctcggcagcgtggcgagaccctgtctctac

SEQ ID NO: 4460 - DNA, 2429 bp, Homo sapiens
aatttgtttcctcatttctttgaactgtagacttctaatacatctagagatgtcatatagttgattagaaagttgagttcagtgggtgcagacctgcaagatcatattcttcctcctgtacatgatgtatcggacagtaggatttggcacccgaagcagaaatctgaagccatggatgattgccgttctcattgtgttgtccctgacagtggtggcagtgaccataggtctcctggttcacttcctagtatttgaccaaaaaaaggagtactatcatggctcctttaaaattttagatccacaaatcaataacaatttcggacaaagcaacacatatcaacttaaggacttacgagagacgaccgaaaatttggtgagtcaggtggatgagatatttatagattcagcctggaagaaaaattatatcaagaaccaagtagtcagactgactccagaggaagatggtgtgaaagtagatgtcattatggtgttccagttcccctctactgaacaaagggcagtaagagagaagaaaatccaaagcatcttaaatcagaagataaggaatttaagagccttgccaataaatgcctcatcagttcaagttaatgcaatgagctcatcaacaggggagttaactgtccaagcaagttgtggtaaacgagttgttccattaaacgtcaacagaatagcatctggagtcattgcacccaaggcggcctggccttggcaagcttcccttcagtatgataacatccatcagtgtggggccaccttgattagtaacacatggcttgtcactgcagcacactgcttccagaagtataaaaatccacatcaatggactgttagttttggaacaaaaatcaaccctcccttaatgaaaagaaatgtcagaagatttattatccatgagaagtaccgctctgcagcaagagagtacgacattgctgttgtgcaggtctcttccagagtcaccttttcggatgacatacgccggatttgtttgccagaagcctctgcatccttccaaccaaatttgactgtccacatcacaggatttggagcactttactatggtggggaatcccaaaatgatctccgagaagccagagtgaaaatcataagtgacgatgtctgcaagcaaccacaggtgtatggcaatgatataaaacctggaatgttctgtgccggatatatggaaggaatttatgatgcctgcaggggtgattctgggggacctttagtcacaagggatctgaaagatacgtggtatctcattggaattgtaagctggggagataactgtggtcaaaaggacaagcctggagtctacacacaagtgacttattaccgaaactggattgcttcaaaaacaggcatctaattcacaataaaagttaaacaaagaaagctgtatgcaggtcatatatgcatgagaattcaactatttagtgggtgtagtacaacaaagtgatattaaattactggatctagtaacatgaaacacacaacgtaagttatttagaatcactttaatcaaccaataatccttagccaatttataagggacttttatttgtaaagtaatggatctggcttgaaaaatacggtagagatacttagctctttaaatcacgaatgttgaagtaccagtgagactcaatacatatttttgaagatagtccatgggatttttagaatgtcgttgtcaagggtctccttttaactgagaaactttttgaactcacaaagtgttcaagaaacccttgtataattccctacatttctctcgagctcacaaatacttttttttctttttccttattcaatcagattttccaaagtacctttccaccataagaaatgaattttctacttctacacccatttgagagacaccaataaaagaaagtcatatgtaggaaacaaagtctgatagtaaaacaagccagagatcttctaactttttttagttataaaacctctaattttttggtgacttttctacacacacacacacatacagtcacatagatattcttatcctacagatataatcagaaaaatcccgattaatgaattatatatagatagatagagtgattagttaatcaaaactatatatttgttaaaaatttgggagaaggtgatggtaatttcattagtcccaaaacaccggcataagaaatttgacatttcacagatgcacttacatattttgaccacaagggggaaattttgtgcattattattgtagggttaaatgcctgaaaaaaataagcatttactaataccttgaaaaaccaaagaacattatgttcctctgtagcaagaaaaattttatgccctcgcattgctacagccaaatagcttataaggcttatggcaatgtcccaactattgcaatcataaaaccctagttttag

SEQ ID NO: 4461 - DNA, 3169 bp, Homo sapiens
aagtttgcgcctcgagagtttgcgcctcgagagtttgcgccggttcgcattccccggcctcccgttcgctcccccgcgaaccaggcggccgtgcgcctctcggggcaaccacccaagagcacccgggcgggaggacgccgagcagggggtgttgcgggctgggacaggggcagccacctcccgaagatgcaggatggcagcagagccgcagccgtccagcctttcctaccgcaccacgggctccacctacctgcacccgctcagcgagctcctgggcatcccgctggaccaggtgaattttgtggtatgccagcttgttgctctgtttgctgctttctggtttcgcatctacttacgtcctggtacaaccagctctgatgtccggcatgcggtcgccaccatttttggcatctattttgtcatcttttgtttcggctggtactctgtgcatctttttgtgctggtgttaatgtgctatgcaatcatggtcactgctagtgtatccaatattcacagatattccttttttgtagcaatgggatatcttacaatatgccacatcagccgaatatacatcttccactatggaattctcactacggatttttctgggcctctgatgattgtcactcagaagatcacaaccttggcattccaggttcatgatggattaggtcgaagagctgaagacctttctgctgaacaacatcgacttgctatcaaagtgaaaccctcttttttggaatacttaagttaccttctcaatttcatgagtgtcatagctggtccttgtaacaatttcaaggactacatagccttcattgaggggaagcatatacacatgaagttgctggaggtgaactggaagcgaaaaggtttccacagcttgccagaaccttctcccacaggagctgtgatacacaagttgggcatcaccttggtgtctctccttttgtttttgacgctaacgaagacctttcctgtcacctgccttgtggatgactggtttgtccataaagcaagctttccggctcgactctgctacttatatgttgtcatgcaagcctcaaagcccaagtattactttgcatggacattagctgatgcagtgaataacgcagctggctttgggttcagcggagtggataagaatgggaatttctgttgggatctgctttcgaacctaaacatctggaaaattgagactgccacaagtttcaaaatgtacttggaaaactggaatattcagacagctacttggctaaagtgtgtgtgctatcagcgggttccatggtaccccacggtgctaaccttcatcctgtctgctttgtggcatggtgtctaccctggatactattttaccttcttaactggaattcttgtcacattagcagctagagcggtcaggaacaactacagacattacttcctttcttcaagagctctcaaggctgtgtatgatgcaggcacctgggccgtcactcagctggctgtctcttacacggtagcaccctttgtgatgttggcagttgaaccgaccatcagcttatacaagtccatgtacttttatttgcacatcataagtctcctgataatactatttctgccaatgaaaccacaagctcatacgcaaaggcggcctcagactctgaactctattaataagagaaaaacagattgatacctccaagagaagcggaacaagcaaaactgcagaacgttcgaaagatgagatgacaaggcttcaagggctcctccggtggcttagaggcgatgtttacatgcatctttattttgttcttttttaaagtgcagggagtattttttttttttttttttttttttttgagacggagtctcgctctgtcgcccaggctggagtgcagtggcgggatctcggctcactgcaagctccgcctcccgggttcacgccattctcctgcctcagcctcccaagtagctgggactacaggcgcccgccactacgcccgggtaattttttgtatttttagtagagacggggtttcaccgttttagccgggatggtctcgatctcctgacctcgtgatccgcccgcctcggcctcccaaagtgctgggattacaggcgtgagccaccgcgcccggccgggagtatttttataaagcctttttgtacagattaatcggccatgtccaggttattggttttgatattttataggacatttgagtggtgtggcgatgtgtagagaatgtgccagagctgcagagacagtccattctgggctgctggctttttgcccttcctgcatgatttccagctactgtgacctggatgctgggaacccaggcatcggctccaaaaattagaaggcgagtgctgagaagacttgtcacaggtttctcaaatcagaatatactcagtcatagtggttccctgggaagccccagaccctttgacttgtgacattactggtttgcagacataataactacactcagaggaccatggaggcagagggatcatggtttcagggcactgaaaactctacgagccaagaggactagtgcatggactgaaagtcaggcatgccctcaaataggctgtattttctttccaggaatgtaacctttcccctttttcttctgacctgagccaagattggaaatcagaaagtctcctgtacatggagctgaagaggggctgctgttttccgaatgttttccatttcacaggcgccacctgcttgcccggggttggtcttgagaagacacccaaatgttcatgcctcagaaaggcagcagaatgccttttaggaaatttttttaaagtaatttgaagttatatagaagtttggtaagaagaagcagttgtttctctcttttctccctcatttcatggaggtgttaatgatcatggctggccgtgatgtacacatgggctgattttcattttttcagtttcatagctgagaaattcaactttgttttagttgaatcatcatattggaaagcagacattgaaagttttcttttctatctttgttatgaatgtgctatggccccttttggagacttctattgggtaatattctatgtgagagaaggaaacttggtattaaatgttgtggaaaataataatgatgataataataaagtatatgctgcaatggtgtactgccaatcag

SEQ ID NO: 4462 - DNA, 3471 bp, Homo sapiens
acagcgctcaggtaagggcgcgacgaagggcgcgcgtctgcggacgggtgtctgcgctccacgcttagctcgtccaggtgggggctcccgcctcctcggctgctgcggtccccgcccagctccttggtcccggcggcagtcatcccccggccgtccgagtccctcgaggccctgagtccggcacctggccatgtgcaaccctgaggaggcagctctgctgcggctggaggaggtcttctcagccaccctcgcccatgtcaacagccttgtcctccagcccctgctcccagccgccccagatccctcggatccctggggcagagagtgcctgcggctcttgcaacagctgcacaagagctcccagcaactctgggaggtgacggaggaaagcctgcactcactgcaggagaggctgcgttacccggactccaccggtctggagtccctgctgctgctgcgaggtgctgaccgtgtactgcaggcccacatagagtacattgagtcctacacaagctgcatggtggtgcaggccttccagaaggcagcaaagaggagaagcgagtactggcggggccagcggaaggcgctgcggcagctgctttcaggtgtgagctcagagggctcggtgggcgcatcgctgggccaggccctccaccagccactcgcccatcacgtgcaacagtacgtgctcctcctgctgagccccggggacaccattggggagcatcacccaacccgggagctggtggtgaacgcagtcaccctctttgggaacctgcagtccttcatgaagcaggagttggaccaggctgtggccacacaggctctctggcacaccctgagaggccggctgagggatgtgctctgcacccctgctcacagactccttcaggacagccaggacgtacccgtgacggtcgcaccgttgcgggctgagcgtgtgctgctctttgatgatgccctcgtcctgctgcagggccacaatgtccacacctttgatctgaagctggtgtgggtggatcctgggcaggacgggtgcacgtttcacctcctcacgcccgaagaagagttctccttttgtgccaaggactcccagggccaggcagtctggcagtggaaggtgacctgggctgttcaccaggccctgcatgggaagaaggacttccccgtgctgggggctggcctggagccctcccagcctcccgactgccgctgcgcagaatataccttccaggcagagggccggctctgccaggccacctacgagggcgagtggtgcaggggccggccccacggcaagggaaccctgaaatggccggatgggcggaatcacgtggggaatttctgccagggcctggagcatggcttcggcatccgcctgctgccccaggcctctgaggacaagttcgactgttacaagtgtcactggcgagaaggcagcatgtgtggctacggcatctgtgagtacagcaccgacggggtgtacaagggctacttccaggagggcctgcggcacggatttggggtccttgagagtggtccgcaggccccccagcccttcaggtacacgggccactgggagaggggccagaggagcggctatggcattgaggaggatggtgacagaggtgagcgctacattggcatgtggcaggctggtcagcgccacggcccaggggtcatggtcacccaggcaggtgtctgctaccagggcaccttccaggcggacaagacggtgggcccgggcatcctcctctctgaagacgactccctgtatgagggcaccttcaccagggacctgaccctcatggggaagggcaaggtcaccttccccaatggcttcaccctggagggctcgttcggcagtggggcagggagaggactgcacacacagggtgtgctggacacggctgccctcccaccagacccgagcagtacctgcaagaggcagctgggcgtgggtgccttccccgtggaaagccgctggcagggagtctacagccccttccgggactttgtgtgtgctggctgccccagggacctgcaggaggccctgctgggcttcgacgtgcagagctccagggagctgcgtaggtctcaggattacctgtcctgcgagaggacccaccctgaggacagtgtgggcagtatggaagacatcctggaggagctgctgcagcaccgggagcccaaggccctgcagctgtacctcaggaaggctctgagcaactcactgcaccccctgggaaagctgctccggacactgatgctgaccttccaggctacctacgcaggtgtcggggccaacaagcacctgcaggagctggcccaggaggaggtgaagcagcatgcccaggaactctgggctgcctacaggggtctgctgcgagttgccttagagcgcaagggccaggccctggaggaggatgaagacacagagacaagggacctccaggtgcatggattggtgctgcccctcatgctgcccagcttctactcagagctcttcacgctctacctgctgcttcatgagcgggaggacagcttctacagccagggcattgccaacttgagcctctttcctgatacccaactgctcgagttcctggatgtgcagaagcacttgtggcccctcaaggacctcacgctgacgagcaatcagaggtactccctggtcagggacaagtgtttcctgtcagccaccgagtgcctgcagaagatcatgaccacggtggacccacgggagaagctggaggtgctggagaggacatacggggaaattgagggcacggtgtcgagggtattgggccgggagtacaagctgcccatggacgacctgctgccacttctcatctacgtggtgtcgcacgcccgaattcagcacctgggagccgagatccacctgatccgtgacatgatggaccccaaccacacaggaggcctgtatgacttcctgctcacagccctggagtcctgttacgagcacatccagaaagaagacatgaggctgcaccgcttacctggccactggcactccagggagctctggtagcctggcctttcctggacagactgaagagctgagcagggcactgccagcctgtccctcattacccaaggcaaggggcaggacaggccctcagaagcagctcttggaggagatgagcattttgttttgcacaggaagatgctgctgctgccctgactgggatgagggtgaggggtgacgggtgtggccctggatgtggtggttttcccttggccactagcccatcttcaatgaccccttaatctgcagcagctcacaggctgggggtgaggagtccctggcttctcttagcctgagcctttctcccaagttccagagcctctccgggcctcagtgctgccatctgtacaatggtggagtgagtacgctgtaaaggaccttccattcattttgctgaattccagagtccttttggaaaactg

SEQ ID NO: 4463 - DNA, 3507 bp, Homo sapiens
agtcccggggagcgcaccggaagttctcgcctggcccaggcgcggggtccaagatggtggcgctaggagccgcgacccagtgatagcggccgtggaggggcccccgaccgagcggggggttgggggtagcctggagattctgaagacaggaataagatgaaggaatggaaatcaaagatggaaatttctgaagaaaagaagtcagcaagggctgcatccgaaaaactccaaagacaaatcacccaggaatgtgagttagttgaaaccagtaattctgaggacagattattgaagcactgggtaagccctttaaaggatgcaatgagacatctcccttcccaagagagcggtatcagggaaatgcatattatcccccagaaagccattgtgggagagattggccatggatgtaatgaaggagaaaaaatactttctgcaggagaaagctcccatagatatgaggttagtggccaaaacttcaaacagaagtcaggattaactgaacatcagaaaattcataatataaataagacctatgaatgtaaggaatgtgaaaaaaccttcaacaggagttcaaacctgatcatacatcagagaattcatacaggaaataagccatatgtgtatgtagcaaatgtgggaaatcttttaggggcagctcagatcttattaaacaccatcgtgttcatactggagagaaaccctatgaatgtagtgaatgtgggaaagcctttagccagaggtcacaccttgttacacaccagaaaatccatactggagagaagccctatcagtgcactgaatgtgggaaagccttcaggcggcgttcactccttattcaacatcggagaattcatagtggtgagaaaccctatgaatgtaaggaatgtgggaagctcttcatttggcgcacagctttcctcaaacatcagagcctgcatactggagagaaacttgaatgtgagaaaaccttcagccaggatgaggagcttaggggagagcagaaaattcaccaggaagcgaaagcttattggtgtaatcagtgtggtagggctttccagggcagctcagacctcatcagacatcaggtaactcatacaagagagaaaccatatgaatgcaaagaatgtgggaaaactttcaatcagagctcagaccttctgagacatcatagaattcacagtggagaaaaaccttatgtatgcaacaaatgtgggaaatcttttaggggtagctcagatcttattaaacaccatcgtattcatactggagagaaaccctatgaatgtagtgaatgtgggaaagccttcagccagaggtcacaccttgctacacaccagaaaatccatactggagagaaaccctatcagtgcagtgaatgtgggaatgccttcaggcggcgttccctccttattcaacatcggagacttcatagtggtgagaaaccctatgaatgtaaggaatgtgggaaactcttcatgtggcacacggctttcctcaaacatcagagactgcatgctggagagaaacttgaagaatgtgagaaaaccttcagcaaggatgaggagcttagaaaagagcagagaactcaccaggaaaagaaagtttattggtgtaatcagtgtagtaggaccttccagggcagctcagatctcatcagacatcaggtaactcatacaagagagaaaccatatgaatgtaaagaatgtgggaaaactcaatcagagctcagaccttctgagacatcatagaattcacagtggagaaaaaccttacgtatgcaataaatgtggggaatcttttaggagcagctcagatcttattaaacaccatcgtgttcatactggagagaaacctcatgaatgtagtgaatgtgggaaagtctttagccagaggtcccaccttgtcacacaccagaaaatccacactggagagaagccctatcagtgcactgaatgtgaaaaagccttcaggcggcgttcactccttattcaacgtcggagaattcatagtggtgagaaaccctgtgaatgtaaggaatgtgggaaactcttcatgtggcacacagctttcctcaaacatcagagactgcatgctggagagaaacttgaagaatgtgagaaaaccttcagcaaggatgaggagcttaggggagagcagaaaattcaccaagaagagaaagcttattggtgtaatcagtgtggtagggctttccagggcagctcagacctcatcggacatcaggtaactcatacaggagagaaaccatatgaatgtaaagaatgtgggaaaactttcaatcagagctcagaccttctgagacatcatagaattcacagtggagaaaaaccttatgtatgcaacaaatgtgggaaatcttttaggggcagctcagatcttattagacaccatcgtgttcatactggagagaaaccctatgaatgccctgaatgttggaaggccttcagtcagaactcacaccttgtcagtcatcaaagaattcataccagagagaaaccctttgaatgtagcaactgtggtaaggccttcagtgggtggacagcttttcttaagcaccagaaacttcacattggaaaggaatttgaagactgtaagagtctacaaacaggacctattctaataggtagcagaaacctaatgaatgcagtaaaactaggaaaagtctgatggagaccacatcttattgcactacaaatgagttttattagaaaaaaaccatgggaaggtgggaaagcagagaaaatgcctactggatttttcaaacgtaagtataatcaagtggaaaagccaaaagctcttggacataatcacctttttttttttctgtctcagaactgacactagaatatggtcccaacgatacaattttttaaattatttattttttaacatacaaagagatgaggtctcactatgttgcccaggctggacttgaactcttgggctcaagcactcctccctcctcagcctcccaaagggttgggattaccggcatgagccactgcaccagccccaggggtctaattacttgagaatgttttaagggatgtctatcattattaaaatcattataaatcactttggcaacaaccccaaaactaaattattcatggaaagagccatttcaatcttgacttcctagtcgagtgacaagtttaaatgtgggaaaaaaccctgtgaaagtaatgagtgtaggccaggtgcggtggctcgtacctgtaatccagcactttgggaagccaaggtgggcagatcacgaggtcacgagttgatcatgaggagttactatgcccagccaacatactaaaaccccgtctctactaaaaataacaaaaattagccaggcatggtggggcacgcctgtagtcccaggtacttgcgaggctagggcaggagaatcacttgaacctgggaggtggaggttgcggtgagccaagatcatgccactgcactccagcctgggcaacaagtgcgaaactccatctc

SEQ ID NO: 4464 - DNA, 3740 bp, Homo sapiens
acttgacaaccagcatgccgagatggcacaccttgggcccaccccacctccacatagccttaattacaaatcagaggacaggcttagtgagcaagactggccagcatatttcaaggtcccatgttgtggggttgatacatctcaaattgagtcagaagaggcagaagtggatgtgagagaaagagagacacagagagacagagagccaaagagggcaagagacttgactttaagagactcctgtactgacaactccatgcagttcggaaccagaacgactacggctgaaccagggttcatggggacatggcaaaacgctgatactaacctcttattcagaatgtcccaacaggccatccgttgcacactggtaaactgcacatgtgaatgttttcagccagggaagattaacctgaggacttgtgatcagtgtaaacatggctgggtggcacatgccttggataagctcagcacgcagcacctgtaccaccccacccaagtggagattgtgcagtccaacgtcgtgtttgacatcagcagcctgatgctctatgggacacaagcagtgcctgtgcggctaaagatcctgctggaccgtctcttcagcgtcctgaagcaagaggaggtactgcacatactgcacggccttggctggactctgcgggactatgtccgaggatacatccttcaggatgctgctggcaaggtgctggaccgctgggccatcatgtctcgagaagaggaaatcatcacccttcagcagtttctgcggtttggagaaaccaaatccattgtggagctgatggcaattcaggagaaagaagggcaggccgtggctgtaccatcttcaaagacagactcagatataaggactttcattgagagcaataatcgcaccaggagtcccagcctccttgctcacttagagaacagcaatccttccagcattcatcacttcgaaaacatcccaaacagccttgcatttctgcttccattccagtacataaaccctgtctcagcaccactgctagggttgcctccaaatgggctactgttagagcaaccagggttgaggctgcgggaacccagcctttcaactcagaatgaatataatgagagcagcgaatccgaagtttctcccacaccttataagaatgatcaaacacccaatagaaatgccctgaccagcattactaatgtggagcccaaaaccgagccagcctgtgtctctcccattcagaattctgccccagtcagtgatctaaccaaaactgaacacccaaaaagctcattccggattcatcggatgagaaggatggggtcagcctctaggaaaggaagagtgttctgtaatgcatgtgggaagacattctatgacaaaggtactctcaaaattcattacaatgctgttcacctgaagatcaaacatcgatgcaccattgaaggttgcaacatggtctttagctccctccgaagtcgtaatcgccacagtgcaaaccccaatcctcgccttcacatgcctatgctaaggaataaccgagataaagatttaattcgggccacctcaggagctgccacccctgtcatagcaagtacaaaatcaaatctggcactcacaagccctggccgacccccaatgggttttaccactccccctctagaccctgtcttgcaaaatcctctccctagccagctagtattttctgggctaaagactgtacaaccagttcctccattttatagaagtttactcactccaggggaaatggtgagtcctccaacctccctcccaaccagtcccatcattccaaccagtggtaccatagagcagcaccccccgccaccctctgagccagtagtgccagcagtgatgatggccacccatgagcccagtgctgacctggcacccaagaaaaagcccaggaagtcaagcatgcctgtgaagattgagaaggaaattattgataccgccgatgagtttgatgatgaagatgatgaccccaatgatggtggagctgtggtcaatgacatgagccatgacaatcattgtcactcccaagaggagatgagcccaggcatgtctgtgaaggacttttctaagcataacaggacccggtgcatttcaaggactgaaataaggagggccgacagcatgacttctgaagaccaagaacctgagcgggactatgagaacgagtctgagtcttcggagcccaaactgggcgaggaatccatggaaggggatgagcacattcacagcgaagtgagtgaaaaagtcctgatgaatagtgagaggcctgatgagaaccacagtgagccctctcaccaggacgtcatcaaggtgaaggaagaatttacagaccccacttacgacatgttttacatgagccagtatggactgtacaatggtgggggtgccagcatggccgccttgcatgagagctttacatcgtctctgaattatggcagccctcaaaagttctccccagaaggtgacctgtgttctagcccagaccccaaaatctgttatgtgtgcaagaagagtttcaaaagctcctacagtgtgaaacttcactacaggaacgttcacttgaaagagatgcacgtctgcacagtggctggttgcaatgctgcattcccctctcgccgaagccgagacagacacagtgccaacataaacctacatcgtaaactgttgaccaaagaactcgatgacatgggcctggactcgtcgcagccctcccttagcaaggacctccgcgatgaatttttggtgaagatatatggtgcccagcaccccatggggctcgatgtcagggaagacgcctcctctcccgcagggactgaagactcccacctgaacgggtatgggagaggcatggcagaggactacatggtccttgacttgagcaccacctccagcctccagtccagcagcagtatccattcctccagagaatccgacgcaggcagcgatgaggggattcttctcgatgacattgacggggcgagtgacagtggggagtcggcacacaaggccgaggcccctgccctccctggcagcctaggggctgaagtttcaggatctcttatgttcagcagcttgtctgggagcaatggggggatcatgtgcaacatttgccacaaaatgtacagcaacaaggggaccctgagagtgcactacaaaactgtgcatttgagagaaatgcacaagtgcaaagtcccaggttgcaatatgatgttttcctctgtacgaagccgaaatcggcacagtcagaaccctaatctccacaaaaacattcccttcacttcagtagattagtctcagaatggacactacaaatgccagctctcaccagatggcctacgtgtttgaactgccatagtcagtgtgcgcttatgtacttggggtgtgtgtgtgtgtgtgtgtgtgtgtgtgtgtgtgcatttatgtatgctctgtggctacatatacacacacgtatttccttgagataaacaagataaacactaggtgcttttgaatttttttcacttccctttatagttttgggaaaggagtgggatctttgatttcagggtgaaaacagagtacccctttaaacacacacacacacacatgcacatacacacacacacacacacacacacacacagtgtgcaactagccccagttttgacagaataattcttggtcttccccaaagagacaatttgttgtacccatgactgttgcctgc

SEQ ID NO: 4465 - DNA, 2675 bp, Homo sapiens
actttttcacactagaatttcaaggtgtgagaggctaaaagacgtccaagtacatgaaacagaacctgcaaataagagtgaatgacgaatagaaagaccacctcaacctgtccacttccctacggccgcagaagttatgattcaaggaataatgagactctaaatcctttaaaattctacaagagcagcctttgccaaacccagcggggagtggctgctcggtgccagcgcgaggagcacgtagactgccgatgccagagaagcccggtgcgggttccgtgctttctctccgttccaggaagaccccagctcgtggccaaatcttcttgccgcttcccggtctgcgcgcctacgctgccggtttcccgacaaaagcgacggcgccctggtgaaaagcagacgcccctcatcggtttgcgccttgcagctcaactatgccccagcctcccacaagccacctgcccgcgtcctccgccaggcgtccagcccggacctgcccccgcggccgccaaggcgcacgtgaagctcccgggcggggggagcgcaaggaggcgggaatttgcggacgcgaacgcaggcctaggaagggaagcgattccagggcgcacgcgcagagcctggagactgggcggggcgtgcctcccgcaggggttacgaacgaaaggcgagcgcgtggcgctcaggagcccgcgcacgcgctgtggtctcgccccgcccatgagcgtccgcgcggccgtcgtagcatcttttcttcagacccgcccggctcgtctacttaacctagcggaggcttggagtgagagcagggaagtgtggggcgaggtgggcggggcgttgcacgcgtgcgcggccagcgaaagaagggagggggcgggagatccgagacaacgttaccccgtcaacacccaatcaggagccggcctgaccccgccccctcttctcacgttattggctgagaggcccccagatgggcggggccggccgtggggttggggagggcagggggcggggaggaggaggaaggcgctggcgggcagtgatggcggctggtgatggggacgtgaagctaggcaccctggggagtggcagcgagagcagcaacgacggcggcagcgagagtccaggcgacgcgggagcggcagcggaagggggaggctgggcggcggcggcgttggcgcttctgacggggggcggggaaatgctgctgaacgtggcgctggtggctctggtgctgctgggggcctaccggctgtgggtgcgctgggggcggcggggtctgggggccggggccggggcgggcgaggagagccccgccacctctctgcctcgcatgaagaagcgggacttcagcttggagcagctgcgccagtacgacggctcccgcaacccgcgcatcctgctcgcggtcaatgggaaagtcttcgacgtgaccaaaggcagcaagttctacggcccggcgggtccatatggaatatttgctggtagggatgcctccagaggactggccacattttgcctagataaagatgcacttagagatgaatatgatgatctctcagatttgaatgcagtacaaatggagagtgttcgagaatgggaaatgcagtttaaagaaaaatatgattatgtaggcagactcctaaaaccaggagaagaaccatcagaatatacagatgaagaagataccaaggatcacaataaacaggattgaactttgtaaacaaccaaagtcaggggccttcagaactgcaattcttactccctttcacagactgtccggagtctttgggtttgattcacctgctgcgaaaaacattcaacaaattgtgtacaagataaattaatctcactatgaagatttgaataactagacattatttatgctgccaaactcatttgttgcagttgtttgtaatgtctagtggggcttcatcatcctgaaaagaaggagacagggatttttttaaagagcaagaaagtcacaatattacttctttccttccttttttccttctttcctttcttctttctctttctttctttttaaaatatattgaagacaaccagatatgtatttgctactcaagtgtacagatctcctcaagaaacatcaagggactcctgtgtcacatactgtgtttttattttaacatgggtgagggaggcgacctgatcaggggaggtgggggtacacatcaatttgagttgttcaggctactgaaacattaaaatgtgaattcccaaacttttctttttggctttgtcagggaaaagaaaaatatctttataaagaaatctttggaaattaggagaaggaatttcaggtgggtttaagtcagagctagttccccaacagaaagatcatttgaaaccagtttttatcccttctctttccttccctttccctaaatcaaatcaatattaattgtgccttatttcacttaacatagacttgaattatttttagggaaagcccctataatgaattcagaaatcactacaagcagcattaagactgaagttggaatattctgttgaccataaaaccttgatatcattctgtgtatatagaatgtaaaaggaatattacagtgttaactgccatatatgtaatatacacaaactcaattagcattgtaatggccaaatgcattcccccatgcttttctgttttc

SEQ ID NO: 4466 - DNA, 2938 bp, Homo sapiens
ttccagaaggcagcaaagaggagaagcgagtactggcagggccagcggaaggcgctgcggcagctgctttcaggtgtgagctcagagggctcggtgggggcatcgctgggccaggccctccaccagccactcgcccatcacgtgtaacagtacgtgctcctcctgctgagcctcggggacaccattggggagcatcacccaacccgggagctggtggtgaacgcagtcaccctctttgggaacctgcagtccttcatgaagcaggagttggaccaggctgtggccacacaggctctctggcacaccctgagaggccggctgagggatgtgctctgcacccctgctcacagactccttcaggacagccaggacgtacccgtgacggtcgcaccgttgcgggctgagcgtgtgctgctctttgatgatgccctcgtcctgctgcagggccacaatgtccacacctttgatctgaagctggtgtgggtggatcctgggcaggacgggtgcacgtttcacctcctcacgcccgaagaagagttctccttttgtgccaaggactcccagggccaggcagtctggcagtggaaggtgacctgggctgttcaccaggccctgcatgggaagaaggacttccccgtgctgggggctggcctggagccctcccagcctcccgactgccgctgcgcagaatataccttccaggcagagggccggctctgccaggccacctacgagggcgagtggtgcaggggccggccccacggcaagggaaccctgaaatggccggatgggcggaatcatgtggggaatttctgccagggcctggagcatggcttcggcatccgcctgctgccccaggcctctgaggacaagttcgactgttacaagtgtcactggcgagaaggcagcatgtgtggctacggcatctgtgagtacagcaccgacgaggtgtacaagggctacttccaggagggcctgcggcacggatttggggtccttgagagtggtccgcaggccccccagcccttcaggtacacgggccactgggagaggggccagaggagcggctatggcattgaggaggatggtgacagaggtgagcgctacattggcatgtggcaggctggtcagcgccacggcccaggggtcatggtcacccaggcaggtgtctgctaccagggcaccttccaggcggacaagacggtgggcccgggcatcctcctctctgaagacgactccctgtatgagggcaccttcaccagggacctgaccctcatggggaagggcaaggtcaccttccccaatggcttcaccctggagggctcgttcggcagtggggcagggagaggactgcacacacagggtgtgctggacacggctgccctcccaccagacccgagcagtacctgcaagaggcagctgggcgtgggtgccttccccgtggaaagccgctggcagggagtctacagccccttccgggactttgtgtgtgctggctgccccagggacctgcaggaggccctgctgggcttcgacgtgcagagctccagggagctgcgtaggtctcaggattacctgtcctgcgagaggacccaccctgaggacagtgtgggcagtatggaagacatcctggaggagctgctgcagcaccgggagcccaaggccctgcagctgtacctcaggaaggctctgagcaactcactgcaccccctgggaaagctgctccggacactgatgctgaccttccaggctacctacgcaggtgtcggggccaacaagcacctgcaggggctggcccaggaggaggtgaagcagcatgcccaggaactctgggctgcctacaggggtctgctgcgagttgccttagagcgcaagggccaggccctggaggaggatgaggacacagagacaagggacctccaggtgcatggattggtgctgcccctcatgctgcccagcttctactcagagctcttcacgctctacctgctgcttcatgagcgggaggacagcttctacagccagggcattgccaacttgagcctctttcctgatacccaactgctcgagttcctggatgtgcagaagcacttgtggcccctcaaggacctcacgctgacgagcaatcagaggtactccctggtcagggacaagtgtttcctgtcagccaccgagtgcctgcagaagatcatgaccacggtggacccacgggagaagctggaggtgctggagaggacatacggggaaattgagggcacggtgtcgagggtattgggccgggagtacaagcgcccatggacgacctgctgccacttctcatctacgtggtgtcgcgcgcccgaattcagcacctgggagccgagatccacctgatccgtgacatgatggaccccaaccacacaggaggcctgtatgacttcctgctcacagccctggagtcctgttacgagcacatccagaaagaagacatgaggctgcaccgcttacctggccactggcactccagggagctctggtagcctggcctttcctggacagactgaagagctgagcagggcactgccagcctgtccctcattacccaaggcaaggggcaggacaggccctcagaagcagctcttggaggagatgagcattttgttttgcacaggaagatgctgctgctgccctgactgggatgagggtgaggggtgacgggtgtggccctggatgtggtggttttcccttggccactagcccatcttcaatgaccccttaatctgcagcagctcacaggctgggggtgaggagtccctggcttctcttagcctgagcctttctcccaagttccagagcctctccgggcctcagtgctgccatctgtacaatggtggagtgagtacgctgtaaaggaccttccattcattttgctgaattccagagtccttttggaaaactg

SEQ ID NO: 4467 - DNA, 2988 bp, Homo sapiens
gatgcatcattcagtaaaaggtcttctagaacgagatttactgactaccagcttagggttctgcaagacttttttgacacaaacgcttacccaaaagatgatgaaatagaacaactctccactgttctcaatctgcctacccgggttattgttgtatggttccagaatgctcgtcagaaagcacgaaagagttatgagaatcaagcagaaacaaaagataatgaaaaaagagaactcactaatgaacggtacattcgaacaagcaacatgcagtaccagtgtaaaaagtgcaatgtggttttccccaggatctttgacttgattacgcatcagaaaaagcagtgttacaaggatgaagatgatgatgcccaagatgaaagccaaacagaagactccatggatgccactgatcaagtggtatacaagcattgcacagtgtctggccaaacggatgcagctaaaaacgctgctgcccctgcagcaagttctggctctgggaccagcacccccctgattccatcacccaaaccagaacctgagaagacttctccaaaacctgaatatcccgcagaaaagccaaagcagagtgacccctctcccccttctcaaggcaccaaaccagccctgccattagcatcgacttcctcggacccaccacaggcatccacagcccagccacagccacagccacagccaccaaaacaaccccaacttatcggaagacctccctcggcctctcaaacaccggtcccttccagtccactgcaaatttccatgacgtctctccagaacagtctacctccacagttactacaataccaatgtgatcagtgtacagttgccttcccaactctggaactctggcaggaacaccagcacgtgcacttccttgctgctcaaaaccaattccttcactctccgttcttggaaaggcccatggacatgccctacatgatatttgaccccaacaatccgctgatgactggacaactgctgggcagttccctcactcaaatgccccctcaggccagttcctcccacaccacagcccccacaacggttgctgcttccctaaaaaggaaactagacgataaagaagataataattgcagtgaaaaagaaggagggaatagcggtgaagaccaacaccgagataaacgcttgagaaccacgatcaccccggaacagctggaaatactctatgaaaaatacttgctggattccaatcctaccagaaaaatgcttgatcatattgcccgcgaagtcgggctgaaaaaaagggtcgtgcaagtctggttccagaatacacgagcgcgggagaggaaaggccagttccgggcggtgggtccagcacagtctcataaacggtgtccgttttgccgagccctgtttaaagcaaagtcggccttagaaagccacattcgctctcggcactggaatgaaggaaagcaggcaggttacagcttgccaccaagccctttaatatccaccgaagatgggggagaaagcccacagaaatacatctattttgattacccatctttgccattaactaaaattgatctatcaagtgagaatgaattggcttctacagtgtcaacacctgttagtaaaacagcagagctgtcaccgaagaatcttttaagcccttcttcttttaaagcagagtgttctgaggatgtagagaatttaaatgcccctcctgctgaggctgggtatgatcaaaataaaaccgattttgatgagacttcatcgattaatacggcaatcagtgacgccaccaccggagacgagggaaacactgaaatggaaagcaccacaggaagttccggagatgtgaaaccggctttgtctcccaaagagccaaaaactctggatactctgccaaaacctgcaaccacacctaccacggaggtctgcgatgacaaatttctcttttctctcacaagcccatccatccatttcaatgacaaagatggcgaccacgaccaaagcttttacatcacagatgacccggatgacaacgccgaccgcggcgaaacgtccagcatagcggacccgagctccccaaatccattcggatccagcaatccctttaaatccaaaagtaatgatcggccgggtcacaagcgttttcgaacgcaaatgagcaatcttcaactcaaggttctcaaggcttgctttagtgactaccgaactccaaccatgcaagaatgtgaaatgttagggaatgagattggtctgcccaaacgcgtagtccaggtgtggttccaaaatgcaagggcaaaggaaaagaaatttaaaattaacatagggaagcctttcatgatcaatcaaggcggaacggaaggcaccaaaccagagtgtaccctctgcggggtgaagtactctgcccgcttgtccatcagagatcacattttctccaaacagcacatttcaaaagtgagggagaccgttggcagtcagctcgatcgggagaaagattacttggctccgaccacggttcggcagctgatggcacagcaagaacttgatcgtataaagaaagcttcagacgtgctgggcttgacggtacagcagccaggcatgatggacagcagttctctccacggcatcagcctgccaacagcctaccccggactccccggccttcctccagtccttctccccggaatgaacggtccatcctccttgccgggatttccacaaaattcaaacactttaacacctcccggtgcaggcatgcttgggtttcctacttcagctacttcgtctcctgccctgtctctcagcagtgcccccaccaaacctttgctgcagactccaccacctccaccacctcctcctcctcctcctccttcatcctctctgtcaggacagcagaccgagcaacagaacaaagaatctgagaaaaagcaaactaagccaaacaaggtgaaaaaaatcaaagaggaggaattagaggccaccaaacccgaaaaacacccc

SEQ ID NO: 4468 - DNA, 4303 bp, Homo sapiens
acacaagctcaggagtagctgccatgcacatcagtgtccattaaaatgacttgtagcaaatctctacgttcaaagtctaactttgacagacaaccttacttccagcgaagtctactcccctccctccggagggaagaatgggctgcggttaagcgtttgccctggtgtcagggccaactgcttcgaagcgccagactttcggagactgtgggtggggagcattaagcgggaaatgaccttcacatttcagtcagaggacttaaaacgtgactgtggtaaaaaaatgtctcatcaacacgtgttttccttggccatggaggaagatgtgaaaacagcagacaccaaaaaagccagccggatccttgaccatgaaaaagaaaacactcgctccatctgtctccttgagcaaaaaagaaaagttgtttcctccaacattgatgttcctccagcaaggaaatcttcagaggaactagacatggacaaggtgacagcagcaatggtactaaccagcttgtcgactagccctttggttcgaagtcctcccgtgcggccgaacgagagcctcagcggatcctggaaggagggcggctgcgtgccttccagcaccagcagcagcggctactggagctggagcgcccccagcgaccagtccaacccgtccacgccgtcgccgccgctctcggctgacagcttcaagcccttccgcagccccgcgcagccagacgacggcatcgacgaggcggaggccagcaacctgctcttcgacgagcccattcccaggaaaagaaagaattccatgaaggtgatgttcaaatgcctctggaaaaactgtgggaaggtgctgagcactgcagcaggtatccagaaacacatccgaaccatccatctggggcgcgttggagactctgactacagtgatggagaagaggacttttactacactgagatcaagctcaacacagactcagtggcagacgggctgagcagcctggccccggtctcaccttcccagtccctggcttcacctcctactttccccatcccagattcaagccgaacagaaactccttgtgccaaaacggagactaagttgatgacgccgttgagccgctcagctcccaccaccctctacctcgtgcacactgaccatgcttaccaggccacaccccctgtgaccattccaggatcggccaagttcacccccaatggcagcagcttcagcatttcctggcaatctcctccggtcactttcacaggcatcccagtgtcacccacacatcatccggtgggcacaggagagcagagacagcatgcgcacacggtcctgtcctccccacccagaggcacagtcagcttaaggaagcccaggggagagggcaaaaagtgtcggaaggtgtacgggatggagaaccgagacatgtggtgtaccgcctgccgctggaagaaggcctgccagaggttcctcgactgagagacccccaggcagaggggctcagggccctgagccgctcctgccctggcctgccactgcaggtgttggaaagagcttttcctactgaataaaacacagttgaagccaggaaaagccctttcaggaaccttggaggaataacagcaaaaacacagaaaaattgtttaagtcaccacctatgacaaaagaaagttgctcttactgagaacccagcttggagcagctataactagttttttttccttcaaaagaaaagtcaactttttttgctgtatgtctagacttaaaactgtggacttctgtagcaattgaaccaacaaagcccattttacctagaaaggaggcatattttgataagctttctgaattatgccattttcaagatttttttgacacttaaaaaacaagctacaggttattcagtagcatttgtacaaagatcaatacttacttttgttgtgaataatcttttccgtatcttccatttgacttcttggagcagtatatgtcaggatgtgttgcaagacagcgcagcactctgggcatcttttctatggctttttgtttgtttttcttttaagaatggccccacactgaaccatggtagagctattagtttgtagggccccagatggcataaactcgagaagggattgtccacggaaatcaccagcagacttcagcccgaagctgagttcaggaagtccagctgtcactgttgggaaacatctaggagtcttccttggatccataagaagctcttcccctaaaggcagcacagctaactctactctctacctgccacaactcagtcaagaattggcacctgtagccatctgggtaagcctcgatgcttctttcagggatgtgacacaaatggcaactcggagctatttgttactgcttgtctgtcaagattgtagccaggttaatgggtcattttccttctctccagactccaccactgactgatttcagaagaggtagagaactccaaactgtcccagcaggtttgctttagacaacagagcacagcccacatggccctacctgttcagaaagtcatgttagatcaacaaaccacttccattctgagtgcacttttataggttttatgctttagcatgtccgggagatgagttaattaacaatataaacattatgtgagtaaatggaaggtccaaactttaagtttttcttataaaaatattggagctattcatttaagaatttgctcaaaagggaacataacgccaaaaggaaaatgcatgtaggtataggaatttctcagtttagtagggccagggcttgcactatgttccatttattgggcttcgtaacttacttgcttgtttgtttgggggatagtggtgtggggagaggggagtcgtcaagccctataaataagctcattctctatctacccgactctcaattgccctgctaaagagttatttctcctatacctatgcaaagtaggaagagcaccttataggaggcactgtatagggacaggggacatgggatcagccataggaatgttaaatgaaattgcacagaggaaagtttaatatatgtctagagattatacatacacttttttaagcgtaaaaagaagacatctagtaatgacagatattctttttatatacaagcaaaagaaagtataaggaggttctacagtgcaacatccacaatctgtgcattcacatattatgggacttttattttttaaactctcatataaattttttaaaattactccttggaagagatcctggtttttttcttcatttatttttttctttaaaaacatttattttaagagaagagaaaaagagcttcatctaattttgcatcttgattaccaatcagtactagtcacagcaccagcaatactgtatgttttagactgacaaggtcagccaggaaatggcatttttttaaacgcagaaatgtgtttgtttcctctactctaacacgtcctttctcctcctggtgtcctgtcaccccccatgcagcaccactgatgcgagatgatgctctggcctggtccaggaagccctgagccatgggcagattgcccagtggccttgggcggccagagcttgtcacctgtttaaacaagttcaccatgtgtttaaatgacagggcacagtcctggaccagaggtttttctcttcagcaaagctccctggcccttgatcgttggactgttactaatagaaaaagattcaagtcatgaagtataaaatccatcccccatcccagaactttgaaacacaaggagggagagatctttgctatggagcagtcctggagcaaagccccgtggcttccacccccagatatataccccataagtagtgctgagctccagcttagctgagccaagctcagtccttatctggtgttcagccagtgcacaggtataagcagaactacagagctgaatgtagcttccctgggatctcttctcctttctaaagcatttttcacacagttctgtacctcctacccaagttggggctgctttctgcctgctagcccacggctctgtgtactttcttttctggcttcaggtgcagacagaccctcagtaccttcctggacacagacacatattccctggaccaaggcgtggaataactagtagaccaccaagccacaggtggctggtcttgaagaaaagggattatactccttacaggccacccagaaagctatgaattccaatatacaccactgatcgtgcaagttagggttttttttttttaaacgtagcattattttgttatattttggaactaaatgaagtgccaaattaaccag

SEQ ID NO: 4469 - DNA, 3950 bp, Homo sapiens
tacatatttgttgaatgcttttaggacatgagatgagaagggggagaaatactcacgatgtggagctggaggtgcgtgggcagccggtgaacagtaatggaacattgacacaagccaggtgggacgagtgtggtgggatggcctgcgagaggggagcagaggggacagggctgggcaattactcagaggcagccgcctggtgcaccttgagaggtatgcatgagaggaacaccagagagggccagggtgggcagggtggcggtgggcaggaggagtgagggtgggagaaggcactgtctgggatgggagatgggggtcttcgggattccctagtgctttccctaagagcagtaggggcgactgaaggctctgggccagagagtggtataattcagttgtttttagattctggaaaaagaattgggagctacagcatattctttccacttctgccctaaactttgttgagtcccatatgctgggaggctgaccaggtgtggcagtgggagctggatctccctccagtcttaaggtgagatgtaggatgtgatttataggtcagatatgagatggaaaatggcagccgacaggacatggctgatgagggaataacctgctcaaagcctgggacagaaggactaggaggaagaaatgttgaaagagggtttcaaggcattttccaggagagtatgatctaaagcatcttctctatctccccaggtgaatgtttgctagcgctgcagagcccctcagtcactcaatcggtgcagacgggtggcagaaaccactggagtcatgtgaatggggacactttcctatgaacagcggttacacaggcaaaggcacccacccctaaaagaagtcaaagactttttctctggaaccaagatggccgaataggaacagctccggtctacagctcccagcgtgagcgacgcagaagacaggtgatttctgcatttccatctgaggtaccgggttcatctcactagggagtgccagacagtgggcgcaggacagtgggtgcagtgcgctgtgcgcgagccgaagcagggcgaggcattgcctcactcaggaagcacaaggggtcaaggagttccctttcctagtcaaagaaaggggtgacagacagcacctggagaatcgggtcactcccacccgattactgcgcttttccgacgggcttaaaaaacggcgcaccaggagattatatcctgcacctggcttggagggtcctacgcccacagagtctcgctgattgctagcacagcagtctgagatcaaactgcaaggcggcagcgaggctaggggaggggcgcccgccattgcccaggctcgcttaggtaaacaaagcagccaggaagctccaattgggtggagcccaccacagctcaaggaggcctgcctgcctgcctctgtaggctacacctctgggggcagggcacagacaaacaaaaagacagcagtaacctctgcagacttaaatgtccctgtctgacagctttgaggacagcagtggttctcccagcacacagctgtagatctgagaacgggcagactgcctcctcaagtgggtccctgacccctgacccccgagcagcctaactgggaggcacccccaagtaggggcagactgacacctcacacggccgggtactcctctgagacaaaacttccagaggaacgatcagacagcagcattcgcggttcacgaaaaccactgttctgcagacaccgctgctgatacccaggcaaacagggtctggagtggacctctagcaaactccaacagacctgcagctgagggtcctgtctgttagaaggaaagctaacaaacagaaaggacatccacaccaaaacccatctgtacatcaccatcatcaaagaccaaaagtagataaaaccacaaagatggggaaaaaacagagcagaaaaacgggaaactctaaaaagcagagcacctctcctcctccaaaggatcgcagttcctcaccagcaatggaacaaagctggacagagaatgactttgacgagttgggagaagaaagcttcagacgatcaaactacgagctacaggaggaaattcaaaccgaaggcaaagaagttaaaaactttgaaaaaaatttagacgaatgtataactagaataaccaatacagagaaccaatacagaaccaatacatctgcttaaaggagcagatggagctgaaagccaagactcgagaattacgtgaagaatgcagaagcctcaggagccgatgcaatcaactggaagaaagggtatcagtgatggaagatgaaatgaatgaaatgaagcgagaagggaagtttagagaaaaaagaataaaaagaaatgaacaaagcctccaagaaatatgggactatgtgaaaagaccaaatctacgtctgattggcgtacctgaaagtgatggggagaatggaaccaagttggaaaacactctgcaggatattatccaggagaacttccccaatctagcaaggcaggccaacgttcagattcaggaaatacagagaacaccacaaagatactcctcgagaagagcacctccaagacacataattgtcagattcaccaaagttgaaatgaaggaaaaaatgttaagggcagccagagagaaaggtcgggttacccacaaagcgaagcccatcagactaacagcggatctctcggcagaaactgcaagccagaagagagtgcgggccaatattcaacattctcaaagaaaagaattttcaacccagaatttcatatccagccaaactaagcttcataagtgaaggagaaataaaatcctttacagacaagcaaatgctgagagattttgtcaccaccaggcctgccctaaaagagctcctgaaggaagcactaaacatggaaaggaacaactggtaccagccgctgcaaaatcatgccaaaatgtaaagaccatcgagactaggaagaaactgcatcaactaacgagcaaaataaccagctaacatcataatgacaggatcaaattcacacataacaatattaactttaaatgtaaatggactaaatgctccaattaaaagacacagactggcaaattggataaagagtcaagatccatcagtgtgttgtattcaggaaacccacctcacatgcagagacacacataggctcaaaataaaaggatggaggaagatctaccaagcaagtggaaaacaaaaaaaggcaggggttgcaatcctagtctctgataaaacagactttaaaccaacaaagatcaaaagagacaaagaaggccattacacaatggtaaagggatcaattcaacaagaagagctaactatcctaaatatatatgcacccaatacaggagcacccagattcataaagcaagtcctgagtgacgtacaaagagacttagactcccacacattaataatgggagactttaacaccccactgtcaacattagacagatcaacgagacagaaagtcaacaagcatacccaggaattcaactcagctctccaccaagcagacctaatagacatctacaaaactctccaccccaaatcaacagaatatacatttttttcagcaccacaccacacctattccaaaattgaccacatatttggaagtaaagctctcttcagcaaatgtaaaagaacagaaattataacaaactgtctctcagagcacagtgcaatcaaactagaactcaggattaagaatctcactcaaaaccgttcaactacatggaaactgaacaacctgctcctgaatgactactgggtacataacgaaatgaaggcagaaataaagatgttctttgaaaccaacgagaacaaagacacaacataccagaatctctgggacgcattcaaagcagtgtgtacagggaaatttatagcactaaatgcccacaagagaaagaaagaaagaaagaaagaaag

SEQ ID NO: 4470 - DNA, 3362 bp, Homo sapiens
aatgggagttgccaagatggccgaacaggaacagctccagtctgcagctcccagcatgaccaatgcagaaggtggatgatttctgcatttccaactgaggtacctggttcatctcattcggactggttggacagtgggaacagcccacggagggcgagctgaagcagggcggggcgttgactcacccgggaagcgcaaggtgttgggggatttccctttcctagccaagggaagccgtgacagactacctggaaaagcgggacactccctgcccaaatactatgcttttaccaaggtcttagcaaccggcagacaaggtgattctctcccgtgcctggctcggcagctcccacgcccacggagccttgcttactgctagcacagcagtctgagatgcatctgcgaggcggcagcctggctgggggaggggtatccgccattgctgaggcttgagtaggtaaacaaagcagccaggaagctcgaactgggcggagcccacctcagctcaacaacgcctactgcctctagactccacctctgtgggcagggcacagctgaagaaaaggcagcagacaacttctgcagacttaaacatccctgtctgacagctctgaagagagcagtggttctcccaacacagcgtttgagatctgagaacagacagactgcctcttcaagtgggtccctgacccccgtgtagcctaactgggagacacctcccagtagggtccaacagatacctcatatatgcagctgcccctctgggacgaagcttccagaggaagtatcacgcagcaatatttgctgttctgcaatatttgctgttctgtagcctccgctggtgatacccaggcaaacagggtctggagtggaactccagcaaactccaacagacctgaagctgagggacctgactgttagaaggaaaactaacaaacagaaaggaatagcatcaacatcagcaaaaaggtcatctacaccaaaaccacatctacaggtcaccaacatcaaagaccaaagatagataaaaccacaaagatggggagaaaccagagcagaaaagctgaaaattctaaaaatgagagcacctcttctcctccaaagggtcacagctcctcaccagcaacggaacaaagtgggacggagaatgactttgacgagttgacagaagtaggcttcagaaggtcggtaacaacaaacttctacgagctgaaggaggatgttcaaactcatcgcaaggaagctaaaaaccttgaaaaaagattagacaaatggctaactagaataaacagtgtagagaagaccttaagtgacatgatggagctgaaaaccatggcacgagaacttcgtgacacatgctcaagcttcaagagccgattcaatcaagtggaagaaagggtatcagtgattgaagatcaaattaatgaagtaaagcgagaagacaaggttagagataaaaaagtaagaaacaaacaaagcctccaagaaatatgggaccatgtcaaaagaccaaatctacgtgtgattggtgtacctgaaagtgatggggagaatggaaccaagttggaaaatatgcttcaggatattatccaggagaacttccccaacctagcaaggcaggccaacattcaaattcaggaaatacagagaacgccacaaagatactcctcgagaagagcaaccccaagacacataattgtcagattcaccaaggttgaaatgaagcaaaaagtgttaagggcagccagagagaaaggtccagttacccacaaagggaacagcggatctctcagctgaaacgctacaagacagaagagagtgggggccaatattcaacattcttaaagaaaagaattttcaacccagaatttcatatccagccaaactaaacttcataagtgaaggagaaataaaatcctttacagataagcaaatgctgacagattttgtcaccaccaggcctgtcttacaagagctcctgaaggaagcactaaacgtggaaagaaacaactggtaccagccactgcaaaaacatgccaaattgtaaagaccatcgatgctaagaagaaactgcatcaattaacaggcaaaataaccagcaaacatcataatgacagggtcaaattcacacataacaatattaaccttaaatgtaaatgggctaaataccccaattaaaagacacagactggcaagttggataaagagtcaagacccatcagtgtgctgtattcaggagacccatctcatatgcaaagacgcatacaggctcaaaataaaggggtggaggaagatctaccaagcaaacagaaagcaaaaaaaagcaggggttgcaatcctagtctctgataaatcagattttaaaccaacaaagatcaaaagagacaaaaaaggccattacataatggtaaagggatcaatgcaacaagaagagctaactatcctaaatatatatgcacccaatacaggagcacccagattcataaatgaagtccttagagacccacagagaaacttagactcccacacaataataatgggagactttaacaccccattgtcaatatttgacagatcaacgagacagaaggttaacaaggatacccaggacctgaatttgactctgcaacaagcagacctaagagacatctacaggactctccaccccaaatcaacagaatatacattcttctcagcactacatcacacttattctaaaactgaccacatacttggaagtaaagcactcctcagcaaatgtaaaagaacagaaatcacaacaaactgtctctcagaccacagtgcaatcaaactagaactcaggattaagaaactcactcaataccacataagtacatggaaactgaacaacttgctcctgaatgactactgggtaaataactaaatgaaggcagaaataaaaatgttctttgaaaccaatgagaacaaagacacaacgtaccggaatctctgggacacatttaaagcagtgtgtagagggaaatttatagcactaaatgcccacaagagaaagcaggaaagatctaaaatcgacaccctaacatcacaattaaaagaactagctgggcaccgtggctcatgcctgtaatcccagcactttgggaggccaaggtgggcagatcacaaggtcaggagatcgagaccatcccggctaacacggtgaaaccccatctctactaaaaatacaaaaaattagccgggcatggtggtgggcgcctgtagtcccagctacttgggaggctgaggcaggagaatggcgtgaacccgggaggcggagcttgcaatgagctgagatcgcgccattgcactccagcctgggtgacagagccagactcagtctc

SEQ ID NO: 4471 - DNA, 3188 bp, Homo sapiens
atgtttgaagagtacccgggtttggtagagtgacttctattcactaaaaccatgtgtctgaactgaagaagcttgggctcacttccacaaatgtagccttgtcagatgatatgcaaatgattcacatcagtgtttgaagttcaaaccaaggaaaactatcagaaaaggcttctgctttctttaaaaaataaaactacttgaaaagaaaaaaatcaagaattagaaagaagagtataacaataaagaaggaggggtcacaggtgaacgagatgtggtcaacacacacaaaggagaacaaaaagtggaaaaatgctaatcactgaaagaaaacattttcggtcaggaagaattgcacaaagtatgtctgaagcaaatttgattgacatggaagctggaaaagtctcaaaaagttgcaatattacagaatgccaggacccagacttgcttcacaattggccggatgctttcacccttcgtggtaataatgcttccaaagttgcaaatccattctggaatcaactgtctgcttctaacccatttttggatgacataactcaactaagaaataacaggaagagaaataatatttccatcttaaaggaagatccttttcttttctgtagagaaatagaaaatggaaactcttttgattcctccggtgatgaacttgatgtgcatcagttacttaggcagacttcctcaagaaattctggaagatctaaaagtgtttcagaacttctggacattttagacgacacagcacatgcccatcagagtatacataactctgaccagatcctactacacgacttagagtggcctaaaaatgatcgggaggcttataaaatggcttggttaagtcaacgccagctggcccgctcctgccttgatttgaatacaattagtcagagccctggatgggcccagacacaacttgcggaggtcaccatagcttgcaaagtaaaccatcaaggagggtcagtacaattacctgaatcagacatcactgttcatgtgccccaaggtcatgtggctgtgggagaattccaagaggtgtctctaagggctttccttgatccgccacacatgcttaaccataatctttcgtgcactgtgagcccgttgttggaaatcatgttaggcaacctcaatacaatggaagcccttttgctggagatgaaaattggggctgaagtaagaaaggatcctttcagccaagtcatgacagaaatggtgtgtttacacagcttgggtaaagaaggcccttttaaagttttaagcaactgctacatttataaagacaccatccaagtcaagctaatcgacttgagtcaggtaatgtatctagtggttgctgcacaagctaaagctcttccgtcaccagctgccaccatttgggattatatccacaaaaccacctcaattggaatttatggacccaaatatatccatcccaattttactgttgttttaacagtttgtggacacaattatatgccaggacagcttacaatttctgatattaagaagggtggaaaaaacatatctccagttgtgtttcagctctgggggaagcagtcatttttacttgacaagccacaagatttaagtatttctattttttcctgtgatcctgattttgaagtaaagacagaaggagaaaggaaagaaattaaacaaaagcagttggaagcaggtgaagtagttcatcaacaatttttattttctttagttgagcacagagagatgcacttgtttgatttttgtgttcaagtggagcctcccaatggtgaaccagttgcacagttctctatcactactcctgatccaaccccaaacctaaaaagactcttgaatctgccaggctatttgcagaagaaggaggaaatcaagtctgctcctttatcaccaaaaattcttgttaaatatcctacatttcaagataaaacattgaactttagcaactatggggtaaccctgaaggcagtgctaagacaaagcaagattgattacttccttgaatatttcaaaggggacacaatagctctcctcggggaaggtaaggtaaaagctattggtcagtccaaagtgaaagaatggtatgtaggagtcctcagaggtaagattggacttgtacactgcaaaaatgtcaaggtgatttcaaaggagcaagtaatgtttatgtcagatagtgtctttacaaccagaaatcttcttgaacagattgtcctgcctttaaaaaaattgacttatatctactcagttgtattaaccttggtgtcagaaaaagtttatgattggaaagttttagctgatgtcctgggttactcacatctgtccctggaagattttgatcaaattcaagcagacaaagaatcagagaaagtttcttatgttataaagaagttaaaggaagattgccacacagagagaaatacaaggaagtttctgtatgaacttattgtggctcttctgaaaatggattgccaagagttagtcgcacgtctcatccaagaagctgctgttctgacttcagctgtcaagcttggaaaaggctggagggaactagctgaaaagttagtacgactcacaaagcaacaaatggaggcatatgaaattcctcatcgaggaaacactggagatgttgctgttgagatgatgtggaaacctgcctatgattttctgtatacctggagtgctcactatggaaataactacacagatgtgttacaagaccttcagtcagctttggacagaatgaaaaaccctgtgactaaacactggagagaattaactggagttttaatactagtaaattctttggaggttttgagagtaactgcattctccacttctgaggaagtatagaaacaaagcgtgtgtttttgatgggagggaaaatgaggtaatggtgtgtgtgtgtgtgtgtgtctgtgtgtgtctgtgtgtgtctctgtgtgtctgtgtgtgtgtgtctgtgtgtgtgtgtctgtgtgtgtgtgtgtgtgtgtgtaggaaagaaagaatctcagaaaagcattatattaattttcttcatgctcaaaaccagtttttttttcctgatgaaagcacagcctaactgataaccaagatgggttttatcctcaaatatgtatttttgtgtatgtttcaaatacaagtattaggctgctttgttcttagaaagg

SEQ ID NO: 4472 - DNA, 4225 bp, Homo sapiens
accgccgagccgccgccattgctggaagcgttcccgccctgctctgcgagttccctcagttgtcttcagttcggccgccaggtatgtctttgcaagactccactctttccagagaggggaaaccagagggagagattatggctgctgtgtttttctcagttggacgcctgagccctgaagttacccagccagatgaagatcttcaccttcaggcagaagaaacacaattggtaaaggaatcggtgacatttaaggatgtggctatagacttcacattggaggagtggaggttgatggaccctacacagaggaacctgcacaaggatgtgatgctagagaattacaggaatctggtctccctggggcttgcagtttccaaaccagacatgatatctcatttggagaatgggaaaggaccatgggtgacagtgagagaaatttcaagaattccctatcctgacatggagcccaaacctgcaaccaagaatgctacacgaacaaaggctatttctgaagatttatcacaggaggccatactagagaaacttacagagaatggtctgtgggattccagaatggaagggttatggaaatggaatgataggatattgagattacaaaataatcaggagaatcatttgagtcaaagaataattccactcaagaagactcccactagtcaaagaggctttagatttgaatctattcttattccagaaccaggcattgccacagaagagcttcacagcagatgccaaacacaagaggaaaatttcacagagaatttaaatttgattacagatacccatttggggaagataatttgcaaggagatgaaaggcagcaaagccataaggcagacttcagaactaactttggggaaaaaatccaataataaggaaaaaccctacaaatgtagtacatgcgaaaaggcctttcattatagatcattgctcattcaacatcaaagaactcatactaaagaaaaaccttatgaatgtaatgaatgtgggaaaacattcagccagccttcatatctcagtcagcacaaaaaaatccacactggagaaaaaccctataaatgtaatgaatgtggaaaggccttcattgcttcttcatcacttatggtacatcagagaattcacactaaagagaaaccttatcagtgtaatgtgtgtgggaaatcttttagccagtgtgcccgtcttaatcagcaccagagaattcaaactggagagaaaccctataaatgtagtgaatgcgggaaagcttttagtgataaatcaaaacttgcaagacatcaggaaactcacaatggtgagaaaccctacaaatgtgatgattgtgggaaagcctttaggaacaagtcatatcttagtgtacatcagaagacccacactgaagagaaaccatatcagtgcaacgagtgtgggaagtcttttaagaataccacaatttttaatgtgcatcagaggattcatactggagagaaaccttttagatgtaacgaatgtggaaaagcctatagaagtaattcaagccttatcgtacatataagaactcacactggggaaaaaccctatgaatgtaatgaatgtgggaaagcattcaaccgcatcgcaaatttcacagaacatcagcgaattcacacaggagaaaaaccctataaatgtaatgaatgtgggaaagcattcattaattattcatgccttactgtacaccacagaatgcatacaggagagaaaccttataaatgtactgaatgtggaaaggccttcatgcgttcttcttctctaattatacatcagtgtattcatactgaagagaaaccttatctgtgcaatgaatgtggggagtctttcagaataaaatcacacttaactgtacatcagagaattcacactggagagaaaccatataaatgtactgactgcgagagggcattcaccaaaatggtaaatctcaaggagcatcagaaaattcatactggagtgaaaccctataaatgttatgactgtggaaagtcctttaggactaaatcataccttattgtacatcagaggacccatactggagaaaaaccatataaatgtaatgaatgtgagaaagccttcactaatacatcacagcttaccgtgcaccaacgaaggcatactggagagaagccctataaatgcaatgaatgtggaaaggttttcacaagtaactcaggctttaatacacatcaaagaacacatactggagagaaaccatttaaatgtaatgactgtgggaaagcatttagccagatggtacatgtcacagaacatcagaaaatccatagtggagagaagccctataagtgtgatgtctgtggaaaagccttcaggaggggttcttaccttacagtgcattggagaacacacactggagaaaaaccctacacctgtaaggaatgtggaaagggttgtattactctatcacagctaaccctacatcagagaattcatactggggagaggccctataaatgtgaagaatgtggaaaagccttcagaactaactcagactttactgtacacttgaggatgcatactggagaaaaaccctataaatgtaatgaatgtggaaaagccttcaggagtagttcgagccttactgtacatcaaagaatacatcaaagagaaactcagttaatataaagaacaataagtcattcacctagatgtcaactccacaagatgaatcttataaactatattttatgaatataggaaaatcttcattaggaatttatcagaaagtatacagagaaactataagcaattatgtgggaaatcatttaataatattaaatcttagaagttataaggaaactctcactagaggaaaataatgaacaaatgaaagtgttcatccagatctcatactttactcatttaacaaattatctttagttaattgcctatatatgtatttgcctatttttctattcatttatctgtcttttcttataaacctggaggtgctttttatatatttttgatattaatcctttgtcattatgtagcagatgtttttcttaatctagcatttgtctttatagtaatgcacaacatttttataggaaaatatttgtatcatttcctttttagattttttattttactcattttacttaaaagagatctccttaatccctaggttatacgtagtatcctaaatgtgtttttaagatttttatgattttattttttacacttaagtctttaatccctctggactggatggttcttcataggagagcaactgtaggtgatcattatcctgtgaaaatattttgaacctaaaaagcactcagggaaatgcaaattgaaatgctcagtgagatgaaacttccccttcatggatctggcaaaaattaagagatcttttgctagctattggggtttgggaaaccatgtactattacttaaaggttgtgtaacatacttccaccagcagtccaacaatatatgtttaaaaatttaaaacatatatactcttagacccagcagtctcacttttggaatctgtccgttagaaataaaagcagcatcaatgcataagaatgtaaataaacatgtttgttgaagtactgtttgtagaggggggcaaagccccaactgcaaacaaagtgaatgcccattaatagggaactggttagataaattgtgacatacccatattatggaacagtgtgagagtaattttaaaaacgacttatatctatgctagctgatttcaatgtatttccacaatgtattgataaataattgctttataacaaatgtatatatacaatatatcatttttgttaaaataatcacacccatttattttgtgtttatgtgtgtgtgtgtggttagatgcacatggagacaggtatggaagaatatacaccaggctgttaatattgattaccttgaggggagtgagaaaaggagaagtagagataagggaaggggagactgtaaaaacagaaaaatgtaaatgctgcctttatggtataaaactgtaaatgtaatattatgtaattatgtgaacttttgagagagatgaaaggatggtctccaaaaaattaatgatggttatttctgttttagtggttcatcaattttttgttttttactttcttttctgtgtttttaagttaattttttccttgcaatgaacctgtaatatttacattaaaaggaaaaatatt

SEQ ID NO: 4473 - DNA, 4435 bp, Homo sapiens
agagtgacagctgaggcttccaggtcaggctgagaggggcgaccatggtctgtttccaggggatgttcagaccatgccagccccgcccctgaggagctcaagatccaaatcacgtgacctctcccttcacacccaagggagtggagagcatgactcctgccttttccatatccaggcacatgtggaaaatgacactatttttagcagcatgctggggtcagctggaggagagtgagagcccgggggaggttacttggactgctggaggggcttgctgtccctggcgcaccatttgggaggttctggtttagagaagcactgtcttctggggcctttcttgggggattagggcgtggctgggaccatctgctgggtccctcaggtgctatgcacctgccgggcatgtgatgccgtttatctcactcagtcttcacaaacccatgagagatgcagtattattccctttatgcagatgaagaaactggggttaattgaggttgagtaccttgcccagggtcacacagtaagcgatagaacctggattcaaccccagtctggagccccatggtgcgtcacatgtatgatcatcctctgtcttgtatgtcttgtttggaaagggttggaaactcttgacatgaggaatggttgttattaatagcaggttttgaggaaatccttctagaagagtcccagtatggggaagtggcagaggagacccctgcctccaacaaccagaatgccaggatgctcgagggaagacagacacctgcctccaccctggagcaagatgccactgactaccgcctccgaagcctgcggaaactcctggctcagccccgggagggcctgctggcccccttctccaagcggaactccacagcgtccttcccagggaggaccagccacattccagtgcagcagccagagaagaggaagcaaaaacccagccctgagcccagccaagattcacctcattccgacaagtggcctcctgggcaccctgtgaagaacctgcctcagatgagggggcccaggcccaggcccgctggtgacagccccaggaagactcagtggctgaaccaggtggagtcgtacatcgcagagcagagacggggtgacaggatgcggcctcaggcccctggaaggggctggcatggggaggaggaagtggtggcggccgcaggccaggaaggacaagtggagggagaggaagagggggaagaagaggaggaggaagaggatatgagtgaggtgttcgagtacgtacctgtgtttgacccggtagtaaactgggaccagaccttcagtgcccggaatctcgacttccaagccctgaggactgactggatcgatctgagctgtaacacatctggcaacctgctgcttccagagcaggaagctctggaggtcacgcgagtcttcttgaagaagctcaaccagaggagccgggggaggtaccagctacagcgcattgtgaacgtggaaaagcgtcaggaccagctacgtgggggtcgctacctcctggagcttgaactgttggaacaaggccagcgcgtggtgcggctctcggagtatgtgtctgcacgaggctggcagggcatcgatccagctggtggggaggaggtcgaggcccggaacctgcaaggcctggtctgggacccacacaaccgtaggagacaggtcctgaatacccgggcccaagagcccaagctgtgctggcctcagggtttctcctggagtcaccgagccgtggtccacttcgtcgtgcctgtgaagaaccaggcacgctgggtacagcaattcatcaaagacatggaaaacctgttccaggtcaccggtgacccacacttcaacatcgtcatcactgactatagcagtgaggacatggatgttgagatggcactgaagaggtccaagctgcggagctaccagtacgtgaagctaagtggaaactttgaacgctcagctggacttcaggctggcatagacctcgtgaaggacccgcacagcatcatcttcctctgtgacctccacatccacttcccagctggagtcatcgatgccattcggaagcactgtgtggagggaaagatggcctttgcccccatggtgatgaggctgcattgtggggccaccccccagtggcctgagggctactgggaggtgaatgggttcgggctgcttggcatctacaagtctgacctggacaggattgggggcatgaacaccaaggagttccgagaccgctggggcggggaagactgggagctgctggacaggatactccaagcgggcctggacgtggagcgtctctccctcaggaatttcttccatcatttccattccaagcgaggcatgtggagccgtcgccagatgaagacgctgtagccggagggtgtccgcggggcccagcactccccgctctggactagcagtggctccccagggccctgctactgttcagggatggggagtggggtgacggctggaccccaagaggcctcgaagctgacggcccactccacctggagctgtcccctcacagaggcaggttccggggctcctgtctctgcctcctgggccttcagaagggaggactttgagagagaggccaggagggaccacttgctcagtcgagaacgggaagagctcctgagaaggacgggtcaggaaggagagatctgactgagcgacaccatcctcatccatgaaggtgcacgcccacatcccccaagcgctcctcacgccaagcgctgaccaccagaccctcttctagtggacatattttattggggggcggggattttaaaaacagaaaaccgaaactgctgtccagagcgggggtgaggttgtgcactgagggactgtccccacgtgcaggcctcccgcccactcctatgtcccttgggcgttgtccctggccgcgggactggtcccacgtggggcaggtctctgctccaccccaggctcgtgccttccagagacacacatctcccagtagccaccaaacagccggccactgattagggcattaacttcctccggatggctcacgtcagaccagaagcacagaacgggctgtttctggtgcttgggcattgggaggtggggagctggcgggcagggggcttgccactccctggcactggacattgaggcctgcagaacaggcagggtgatgaaggcaggggagagaagccctttcccttaccggcgtgcctgtgggtaaggcctcccgagaggacatggagaagaggtaaagaggatgtggacatatctgtcaatttccttaggcaagaagcgggtgggggctggacagaaagggacgaaaagggaagtggaagctgtgagcctcacagtccagctccactgcagacctgcccttctgcagggagagccctggccacccggccttgagtggaagaagaggaaagggtgtacgggggcaaaaccctggacagggagcaggataagaagggggcgggatgagaggtttggggaggtgaggacattgccctgagatatcccctggaggcagggagaggagtgggggcaggaggaactgaagaggggggcagtttcagggaaaatagcccttagcctttttagtcgatgccaccctttctgtcacctggagaccttgtacttctcttgcactaataaccccggtgcttttgtggctgggggtttttctgttgctgctgctgcctccaccactgctgtgaattcacccatggtgcattggacactggatcttgaactccagagtctgtttagggaggtgagcacagggctgggggaggtgcggcggggcccagaagaccaggccactgagcccgcgctccaggctgtgacggtccaaaccacggcactggagctgcagggtctgcctagtgggctctgcattccccgagagcacgagtttggcacatgggagaatggagcccgtggagaaccttctggggggtcggggagaatccctgcctccctttaaggaatcatgaaggacagagacttttgagattgtggcttaggaaggccatacctgctccctgggctgtggctttttctggtccctgctgaggccgactggcccctggagaaggatggtggggcataggctagggctgcagttggccagtggggctgccagtttctttctgggaccactctcgtcctcgggcattgcactggaaggctggaaccagcccaaactgcccacctgcttcacttccaatgactaggagccagcccagcctcctgccctgcccacacccctgcgccctgggccagtgccttgcgtttgatgttacctccacaccatctgccttaagaggaagggccgggcaaggcccctactccctagagaaatgtcttgggtaggagagggtgtgggatggtgggaggggaagcattaaatacagcaacttcttag

SEQ ID NO: 4474 - DNA, 2635 bp, Homo sapiens
aagctaaggaacggtttggggcagtgtcgttcccggaggtcggccgccgttacccgctcaccagctacgcggcgcgtcaggtccgcggaggcgcgggctcggggcgcctgcgggacggtgaggccctgctgaggactccggacactgcccatctctaagataagaacctggaaaggggactctgttggccattggaaattgcagaataatgtctcagcgtcagtacccagagtgttacctggcaccaaatggatgcttagtaagtaattgtggagtgaataagatgagtaatgaagaactggtggggcagaatcatggcatggaaggtgaagcttgcacaggaggggatgtgacatttagtgatgtggctatagacttctctcatgaagagtgggcatgcctagattctgctcagagggacttatacaaggatgtgatggtccagaattatgagaacctggtctctgtaggtctttccgtaactaagccatatgtgatcatgttattggaggatggaaaagagccctggatgatggagaaaaaactgtcaaaagattgggaatcaagatgggaaaacaaggaattatcaacaaagaaggatatttatgatgaagattcaccccaaccagtaacaatggaaaaagttgtaaaacaaagttatgaattttcaaattctaataagaatttggaatatacagaatgcgacacatttagaagcacctttcattcaaagtctactctttctgaaccacaaaacaattctgctgaagggaattcacacaaatatgatatattaaagaagaatttatcaaaaaagtcagttataaaaagtgagagaataaatggtggaaagaaacttttaaattctaataaaagtggggcagccttcaaccagagcaaatctcttacccttccccagacttgtaatagagagaaaatctatacatgcagtgaatgtgggaaagcctttggcaaacagtcaatcctcaatcgccactggagaattcatacaggagagaagccctatgaatgtcgtgaatgtgggaagacttttagccatggttcatcccttacacgacatcagataagccatagtggagagaaaccttacaaatgcattgaatgtgggaaggcctttagccatggctcatcacttactaaccatcagagcactcacacgggagagaaaccgtatgaatgtatgaactgtggaaagtcttttagtcgtgtgtcccttctcattcagcatctaagaattcatacgcaagaaaaacgctatgagtgtcgtatatgtggaaaggccttcattcatagttcgtctctcattcaccatcagaaaagccatactggagagaagccttatgaatgtagagaatgtgggaaagctttctgctgtagctcacaccttactcaacatcaaagaattcacagtatgaagaaaaaatatgaatgcaacaaatgtctcaaggtctttagtagcttctcatttcttgttcaacatcagagtattcatactgaagaaaaaccgtttgaagtttagaaatgcaggaaatccttcaaccagcttgaatcactgaatatgcatttgagaaatcacattagattgaaaccctacaaatgcagtatatgtgggaaagcctttagtcataggtcgtccctgcttcaacatcacagtattcatactggagagaaaccttacgaatgtattaaatgtgggaagaccttcagctgtagttcaaaccttactgtacatcagagaattcatactggagaaaagccatataaatgtagtgagtgtgggaaagcttttagcaaaggctcgaatcttactgcccatcaaagagtacataatggagagaaacccaatagtgtggtaagtgtggaaaagcctttagatcatatgaatccctatacatgtgagaaatcttacagaagagaagcagtgtttatcatggtaaacttcattcatagatcctcccttatttaacatcagaaaaatgtatactggggaaaagttgtatgaaggtggtgaacatgggagacttttagcaatgatgcagatttttttattagagtttatactgtagagaaatcatatgaagtcaataaatgtgggaaagcctttgtcagtattaatcccttaattgacgtaagtatactcacactaggaaaaatctgtgtacatgtagcaaatgtgggaaagactataggcaataggaatctcctgcaaactcctacaggagaaaagttgtatgaatgtggaaactttagaaattgaaggaatttttcagttccaagtgcatcccttattctataggaaataaactggagacaaatctcatttaagagatgcagcaaagtgttcactaagagtgtttatcttgccagacataagaagatgaatggtagagcaacctgaaggatttagaaattacatataaatctttgcagttatgctatttgtaaacaggattatataggagagcaaataaacataagtatgcatttcttagagcagtagcttgcagtttcagttgagttctacttagaaattctttttagctagtgggcatgtgaagatatttagtcacccagaggagccagtaaatgttataatgttaaaaattaaagctgc

SEQ ID NO: 4475 - DNA, 2991 bp, Homo sapiens
attattgaaaatgcgaggtgtagcctgggctgggtaatgaaggggagcgagcgagggggagcaaggagcatggagctgcatactgatgagtgtaggagtacttgataaaaaagaattctggctgccggccgtgcattgctcattgtggagtactccaacaatcacatagaacgcagaccagcccaagctgacagcttgatatgccttcttctgctgcctggttttgggggctgtatgacgtactggtcggtagtaaagattaatatgtaagaaatgtggagctaggatcaagtcatactccacagcctgcctggcaaactatgttttacttctgactttgctctctcgctgagaacattaatctgtcaagctggcgggctcctttgatagcaactttcccaggggcatgatgtggcaatgccacctctcagcccaggactaccgctattaccccgtggacggctactccctgcttaaacgcttccctcttcatcctcttacaggacccagatgccctgtccaaacagtgggacaatggttggaaagcattgggctacctcagtacgagaaccacctgatggctaatggatttgacaatgtgcagtttatgggaagcaatgttatggaagatcaggatttgttggaaattggaatccttaattctgggcacagacaaagaattctacaggcaatccagctccttccaaagatgagacccattgggcatgatggctaccatcccacctctgtagctgagtggctggattccattgaactgggcgactacaccaaagcctttctaattaatggctacacttcgatggacctgttgaaaaaaatctgggaggttgaacttattaatgaatggaacattactaaactttcaattgagtatgattctgagccctttggaaaggaacgagacgcagctattaagaaactggcaactgaagctggagtagaagtcattgtaagaatttcacatacattatatgacctagacaagatcatagaactcaatggtggacaaccgcctttaacttataaaagattccagactctcatcagcaaaatggaaccactagagataccagtagagacaattacttcagaagtgatagaaaagtgcacaactcctctgtctgatgaccatgatgagaaatatggagtcccttcactggaagagctaggttttgatacagatggcttatcctctgcagtgtggccaggcggagaaactgaagcacttactcgtttggaaaggcatttggaaagaaaagcttgggtggcaaattttgaaagacctcgaatgaatgcgaattctctgcttgcaagccctactggacttagtccttatctccgatttggttgcttgtcatgtcgactgttttacttcaaactaacagatctctacaaaaaggtaaagaagaacagttcccctcccctttccctttatgggcaactgttatggcgtgaatttttctatacagcagcaacaaataatccacgctttgataaaatggaaggaaaccctatctgtgttcagattccttgggataaaaatcctgaggctttagccaaatgggcggaaggccggacaggctttccatggattgatgccatcatgacacagcttcgtcaggagggttggattcatcatctagccaggcatgcagttgcttgcttcctgacacgaggggacctgtggattagttgggaagaaggaatgaaggtatttgaagaattattgcttgatgcagattggagcataaatgctggaagttggatgtggctgtcttgtagttccttttttcaacagttttttcactgctattgccctgttggttttggtaggagaacagatcccaatggagactatatcaggcgttatttgcctgtcctaagaggcttccctgcaaaatatatctatgatccctggaatgcaccagaaggtatccaaaaggtagccaaatgtttgataggagttaattatcctaaaccaatggtgaaccatgctgaggcaagccgtttgaatatcgaaaggatgaaacagatctatcagcagctttcacgatatagaggactaggtcttctggcatcagtaccttctaatcctaatgggaatggaggcttcatgggatattctgcagaaaatatcccaggttgtagcagcagtggaagttgctctcaagggagtggtattttacactatgctcatggcgacagtcagcaaactcacctgttgaagcaaggaagaagctccatgggcactggtctcagtggtgggaaacgtcctagtcaggaagaggacacacagagtattggtcctaaagtccagagacagagcactaattagaaaacattcaggaggaatactgttgcagctgaaattggtggggagttcaatacttttcaattaagttatttaaaaatattcttcattgatggaaagcagttacatattgaaatatgttgtttctaatgacatttctgtggtttttaactttttaatgaatttcacagagtacaattggtaatttgtatataaagaacttggcaagagaatttgcttaatgtaaatataaacagtcacaattagtatagacccatcgatatatttttgataatttttcatgtatggtaaagttaaaatgacaaattgatattctgatataaaactcaaagttttgaagtcagtgggaaaaaaggaggtttttagactttcttaaaagacgttaaaattttaggacagaattttcttgatgttgtttgatctaactttgcactctttgataataatgttttagataatgtgcgtaatccaaattggtattgtagcctctgttaacacagacagtatatgttttaaactttgatgtaaacctttttagacccaaacttgtggaagtatcatgtgttaagttctctgtctctgtttctttgttcatttattactaaaatgaacttgttattaaagtatatgcaaatatg

SEQ ID NO: 4476 - DNA, 2958 bp, Homo sapiens
aaattgcggaacgcgaggggcgagcgcgagggagcccccctccggaacccctgcccacccccggagcgccggcagcggcggccccgcgaggatcggctccaggagatgatagaaagtgacacctcatccataatgtcaggaattattcgaaactcagggcaaaatcaccacccctctccacaggaatacagggtcaagcagggcaggcttcctggcagaggcggcattgggctgtcagcctgagaccctttcatgcctggcctgccctgtcctgccctgccctgccctgccccacctcctgcccccagctgtctgatcgccatggccctgaagaacagcaagacaggcagcctgcctgtgagcgagatctacagcttcatgaaggagcacttcccctacttcaagacggcccccgacgggtggaagaactcggtgcggcacaacctgtctctgaacaagtgcttcgagaaggtggagaacaagatgagcggctcctcccgcaagggctgcctgtgggctctgaacctggcccgcatcgacaagatggaggaggagatgcacaagtggaagaggaaggacctggctgccatccaccggagtatggccaaccctgaggagttggacaagctgatctccgaccggcctgaaagctgccggcgccccggcaaaccgggggaaccagaggcccccgtgctgactcacgccaccacagtggccgtggcgcatggctgcctggctgtctcccagctcccaccccagccactgatgaccctgtccctgcagtcagtccccctgcaccaccaggtccagccccaggcacatcttgctccagactctccagcaccagcccagaccccgccactgcacgccctgccggacctcagccccagcccgctcccccaccccgccatgggaagggctcctgtagacttcatcaacatcagcaccgacatgaacactgaggtggatgccctcgacccgagcatcatggacttcgctctgcaggggaacctgtgggaggagatgaaggatgagggattcagcctggacacactgggcgcctttgcagactccccgcttggctgtgacctgggggcctcaggcctaacccctgcctcgggtggcagcgaccagtccttcccagacttgcaggtgacgggtctctacacagcgtactccactccggacagtgtggctgcatcgggcaccagctcctcctcccagtaccttggtgcacaggggaacaagcctatagccctgctttgagctgtcagcctcacctgccctggaaccccggcacccggcttgggcagagaactgactagaacagggtgttcccagaaggcaggtccctcattgtccccgaagcctctcctggacctgtggcgaagttgccggctggacagggaagcggttcccctcagcagcccctctccttctcgtgcctccccctggagcttccggagcagtttctgggggctcttccaagtcagaagaatggaggaaggtggacaagcaacccagcatcccctgaccccttgacactcctccgaggcctgagccgcaatgcctgcccgtgttgagtgagacttctccatcctggatcctggctgcgtgacctcagtgacctgcaccccattttgggacaccttggtgcattaaggaaacaccctggggtgaaagcccttgaattcatcctcatgggaaatggctgagtggatcaaacctcagccgcagcctccgggggacaggcccagggcgggaaatggagccggagaagcttgagcctctctcttggacaggacaagctgaactctgaaatgggagccggtccaggtggccttcagccccacctttccgatagtctgttagaattttattagcgcagattcctgggccatgccgggtaccgtgaccttgtgtaaatttatttatatttattgtggcccatccaccccacttctgcaaacccatcccgaggcctctggaatgggactccttctccctccctacctcccagccatcctaactcctacaggccagagaatgacatctctaactggctcataatcccttggcagcctggggctactttttagaaccagcaagcactgttgatactgtgaaacatcccattttttccgtattagagaccagatatttttctacctgttcatgattcacatctcttcttgcatgtacctaagaggggcggtgccattgtttgggggcttggggggctttcaaaggggaaaatgcgatgggagagggaggaactggaggggggtgcttttgtactgggatttaagacacccctgatggaatgaaagccaactgaaccacgtaaagctcgaaccacgtggcaagtggtggacaaaacttcaacgcatgatatttattggcacttccttacctccctttgccctgcagctgtttttatgcttctttttctctccttgctaattactgactccccaagtggcaagttccgcagatagctgggttagaagagagacaggggagtgagctagtcaaatgtgaaaaatgctctcccagcaaagctgagacaaaattggagaagctgcagcctcacgcaccatccccctctttccaccagatggatgttgacttggtgtctgggagttcccgaaccctagagccaggatgttctgtttaatcaacagctcagccagctgcctgggagttttggcattaagccccgccttgaagggcgagctttaagtttttcccagttctggaactttctaccgagtatccaccacccttagacacaatcccagtgctacccgtctgacctgcactgctcatctgctttgtgtaacatgacccctgataagatgttgaaactgttattcacaaagactccgtgtttgggcaacatcaagactgtaagtgtagaattgagcaactgtcttctatcaataaaggctgaatggc

SEQ ID NO: 4477 - DNA, 2218 bp, Homo sapiens
agcaactccgagtgcaggcgccgagcgcgggggatgctgccgccgccgccgcttctgctgccgcgcgggcggctcccgcagccccgctccgcccggccaccgcgcgggcactgactcccgctcggttccgtttcgccggcccggccccctcctaggctggaatcctcccgcggggctcgtcgtcccgacgcgaatctgaggagaaacaggagcgagagactgaggggagagcgcggcgagcatgcggaggcgggggagcctcggcgctcaccacagaggggtgcagtgagccagtctccagaggacgtgccgggggtggctgcgtgccctcgtggcgggttcccagcccaccgtcgccggccccggcgcgctgcggctgtgggcgcggggtgcgtggaagcggcggctgcggcggaggaggcggctgctgccccatggagtgttactacattgtcatcagctccacgcatctcagcaacggacactttcgcaacatcaagggagttttccggggccctctcagcaagaacgggaacaaaactctggactatgctgagaaggaaaataccatagcaaaagctctggaagatctgaaggcaaatttttactgtgaactctgtgacaagcagtactataagcaccaggagtttgacaatcacattaattcatatgaccatgctcacaagcagaggctcaaggaactgaaacaaagggaatttgctcgaaatgtagcatctaaatccaggaaagatgaaagaaaacaggaaaaggcactccaacgcctgcacaagctggctgagctaagaaaggaaactgtatgtgctcctggaagtggccccatgttcaaatcaacaactgttactgtgagagaaaactgtaatgaaatttcccaacgagttgttgtggattcagttaataaccagcaagatttcaaatatactttgattcatagtgaagagaatactaaagatgctaccactgttgctgaagatccagaaagtgcaaataattatacagcaaaaaataaccaagttggggatcaagcccaggggattcacagacacaaaatcggcttttcttttgcatttccaaagaaagcgtccgtgaagctagagtcctcagctgcagccttctctgaatacagtgatgatgcctcagtgggaaaaggatttagcagaaaaagtagatttgtccccagtgcttgtcatcttcaactatcttcaccaacagatgtgcttttgagttctgaggagaaaactaactcttttcatccaccagaggcaatgtgcagagacaaagaaactgttcaaactcaagagataaaagaagtctctagtgaaaaagatgcattattattaccttcattttgcaagtttcaacttcagttatcttctgatgcagataattgtcaaaattcagtcccattagcagatcaaataccactagagagtgttgttattaatgaagacatacctgttagtggtaacagttttgagttgttaggaaataaatccacagttcttgacatgtctaatgattgcatatctgtgcaagctaccacagaggaaaatgttaagcataacgaggcatccacaactgaggttgaaaataaaaatggtcccgagacattggccccttcaaatactgaagaggttaacataactatacataagaaaacaaatttctgcaaaagacaatgtgagccatttgtacctgtccttaacaaacacagatctacagttcttcagtggccatcagaaatgctggtttatacaactacgaaaccatcaatttcctatagctgtaatcctctatgttttgacttcaagtctactaaagtaaataataatctagataaaaataagccagacttaaaagatctttgttctcagcagaagcaggaagacatttgcatgggaccactttcagattacaaggatgtatctacagaaggactcactgattatgaaattggaagtagcaaaaataaatgcagccaagtcactcctcttttggctgatgatattctctccagtagttgtgattctggaaaaaataagaacacgggtcagaggtataaaaacatttcctgtaagatcagagaaacagaaaagtataattttactaaaagtcaaataaaacaggacactctagatgaaaaatacaacaaaataaggttgaaagagacccatgaatactggttccataaaagtagaag

SEQ ID NO: 4478 - DNA, 2066 bp, Homo sapiens
agcatgcaacttggcttcacctgtcaaaggcgcctttttcgaagacgcccgggagctcttgcttttgcttgagggtctttggtgttgactgagagcgaattaaaaggttctcagctttcgctaaggaacgcattctggagtctagaacaggcgaagatgggactggggtgtctggggacttggacgtgagcgagcaagggaatccgggatgttgtaaaagttgttgagttctggatttgattctcagcttggtcgctgttggtgcatagaagagctactaatttgtgtacgtcggaaactttgccgaattggactacatttctagaaatggattcctgaattaaaagagatgcttctcttaaatatttatgtaaagttactctcagaaaggttgtaagtggattcctcccaccaaaagtattgtgaatgaatatcttcttaaaatttacaattgttttgaccatttcccagtccttaaaccaatgataacattttattttctttttcttttttcttttctttctttcttttttttttttttttttgagacagagttttgctctagttgcccaggctggagcaatggcacgatcttggctcaccgcaacctccacctcccaggttcaagcgattctcctccctcagccttcccaagtagctgggactacagacatgcgccaccaagcccagctaattttgtatttttagtagatatggggcttctccatgtgggtcaggctggtcttgaactcccaacctcaggtgatccgcccacctcagcctcccaaagtgctgggattacaggcgtgagccactgcgcccggcctttattttcataatatttccatgtcttttatttctcataagcttacatatgcattcaagtatttattggtcattttcaatttttccttctaagagtctatattctttacctatttctacacatttttgtattcatctatatgttgatttgttttaaatttattatctgtttgttgtatctgaaatattttcccttagtttatttgctacttaaatttgagggaggcagggaagtttactgaaacatactttatattttctataatttattaactatttacttcataatttgtgttttggctgtcaagcctacagaccaaaattataataacatcaatttgtaatttgataagcactctggtagtctatttttaagttatacatgtcgtgaacattatttgttttaatgtgtgagggatggaagttactttatttttccaggtggttaactagttaacacagattattgcttttctgtaatacttttactgagatataattcatatactctaaaactcacccatttaaagtgtacaattcagtagattcttttttatttctttgagacagagttttgctcttgttgcccaggttggagttcaatggcgtgatctcagctcactgagattattgcttttctgtaatacttttactgagatataattcatatactctaaaactcacccatttaaagtgtacaattcagtagattcttttttatttctttgagacagagttttgctcttgttgcccaggttggagttcaatggcgtgatctcagctcactgcaacctccgcctcctgggttcaagcgactctcctgcctcagcctcccgattagctgggattacaggcacctgccatcacgcctggctaatttttgtattttttagtaaagacaggggtttcaccatgttggccatgctggtcttgaactcctgacctcaggtgatctgcccacctcagtctcccaaagtgctgggattacaggtgtgagccaccgtgcctggccgaattcagtagtttctagtgtattcaaagagctatgcaaccatcatcacaatcaattttagaacattttcattgcccaaaaagacaccaatacccactagcaatcatcattttcagccactccatgggctacagggatcttttctgttattgcacttgttctatattcatatttcatgtaataaacatgcattgcttttgtaattacaaagtaaaaagaaaaacgtttt

SEQ ID NO: 4479 - DNA, 3054 bp, Homo sapiens
acccgggcggccggcagaaggcccgcatcctgcaggccggcacgccgctggggctcatggcctacctgtactccagtgatgccttcctggagggttatgtgcagcaattcctctacaccttccgctacttctgcacaccccacgacttcctgcacttcctcctcgaccgcatcaacagcacgctgaccagggcccaccaggaccccacctcgaccttcaccaagatctacaggcggagcctctgcgtcctgcaggcctgggtggaggactgctacgctgtggacttccctcggaacagcgggctgctggggaagctagaggacttcatctcctccaagatcctacccctggacggctctgccaagcacctgctgggcctcctggaggtgggcatggaccggcgggccgagggcaaccctcgcggcacagacctggagaaccccagggaggccgaggaggatgccagacccttcaacgccctctgtaagaggctctcagaggacggcatctccaggaagagcttcccctggaggctgccccgaggcaacgggctggtgctgccgccacacaaggagcgcccctacaccattgctgccgccctgcccaagccctgcttcctcgaggacttctacggcccctgcgccaagaccagtgagaaggggccctacttcctgacggagtacagcactcaccagctcttcagccagctcacgctgctacagcaggagttgtttcaaaagtgccacccggtccacttcctgaactcacgggccctgggcgtcatggacaagagcactgccatccccaaagccagctcttctgagtctctttcggccaaaacctgcagcttatttctgcccaattacgttcaggacaagtatctgttacagcttctaagaaacgcagatgacgtcagcacctgggtggctgcagagattgtgaccagccacacctccaagctgcaggtgaacttgctgtccaaatttttgctgattgcaaaatcttgctatgagcagagaaacttcgcgacagccatgcagatcctgagcgggctggagcacctggccgtgaggcagtcccctgcctggagaattctgcctgcaaagatagcagaggtcatggaggagctgaaagccgtggaggtcttcctgaagagcgacagcctgtgtctgatggaagggcggcgcttccgggcgcagcccaccctgccctcggcccacctcctggccatgcacatccagcagctggagacaggcggcttcaccatgaccaacggggcccacaggtggagcaagctcaggaacatcgcaaaggtggtgagccaggtgcacgcgttccaggagaacccttacaccttcagccccgaccccaagctccagtcgtacctcaagcagaggattgcccgcttcagcggtgccgacatttccacactcgccgcagatagcagggccaacttccaccaggtctccagcgagaagcactcacggaagattcaggacaagctacggaggatgaaggctacattccagtagccgagctcgggcctggtgtggaattccagatccgaatccgactgtggggggcgggctgggaggtgggagccgcgtctcaggcccggccgttatcaaggcccctccgcccccgaaccctggggagctggaccaggaggtggaggctcaggggaccccatggggacaggcagagctggtctcctcccagcagacggagccaggacgggcacaagagtcttggaggtttgcgtgtttctgctagaattaaaaagttaaatttaaaaatgaaaatgaaagacagcttcccaggagttttgtgcctgtctgcgcctctcacacacagataagtggctcttacccagctctcagtgactcccccacaaaacagcaacagcctccaccgccaactcaacaaacttcagagtagctcctccctgagcaggtttctgagccagcctcggttggctgagcaacgaagggccaaagctgacctctgagtggccaactgcagctcccagggactccgagacctccggtccgagaccctgcctgggttcaccccccacaacccagacccagaaccgctctccccttccctgcccagtgcccctcctccccagcccagacccccaggtgcccaaggcctgctgctggagcaggcaccttgggctgggcctgctcccccagggcccagggccccccagcttagaacagcccttggtgaggtggtcatgcccgggcaaaggccctgcttcctggaaaggacactcagagcagctccaagacagaggctctgtggcgggggtccctgagagtgcccccacccatctcatgccccagggaccgccactgcccaccgcctccagcagccatgcatgtgcgcccgcagccctgcctccacagctcgccacacactcacgcttcgccagagacaggaagtgcgctgcctccacggccccttgcccttgctcaggttcttggaccccaggcagctggtgtggagccccttggccagggccatgggagtcccgcgcagtcagctccacattggcctctgcagctgggtgaccagagccccgggcacggccccagctccgtggggctctcacggtgccaatcacaagacccagggttgtgcttttgagttttagaattagtcattctttagagcagccagctagtggcatttctaggaaaactgtgacctgtgacaaatcgctgcatttttaatgtcaagatgtgttttcccacataaattcaccggagacatccgggccccgcttcgatgtaacatgagaggaagtcggcgtcctggccacgaaatgcagttcacttttttttaggcttttatatggattatgttttgctgacccacgcccgcattttcagattttgtatctaacagacagtgctcagtgcaaatcaacattccagcggtcaggactgaccccggggcagcactgggctcaggcttcagcgcgactgtccgcatggctccctcccgtcctggcaccaatttctgaataaagtcctttctaccagc

SEQ ID NO: 4480 - DNA, 4072 bp, Homo sapiens
accttttctcttgcaggcgctccagctgtgctgcctctgctgtgcgtcggtcgccgcggccttagccagtgacagcagcagcggcgccagcggattaaatgatgattacgtctttgtcacgccagtagaagtagactcagccgggtcatatatttcacacgacattttgcacaacggcaggaaaaagcgatcggcgcagaatgccagaagctccctgcactaccgattttcagcatttggacaggaactgcacttagaacttaagccctcggcgattttgagcagtcactttattgtccaggtacttggaaaagatggtgcttcagagactcagaaacccgaggtgcagcaatgcttctatcagggatttatcagaaatgacagctcctcctctgtcgctgtgtctacgtgtgctggcttgtcaggtttaataaggacacgaaaaaatgaattcctcatctcgccattacctcagcttctggcccaggaacacaactacagctcccctgcgggtcaccatcctcacgtactgtacaaaaggacagcagaggagaagatccagcggtaccgtggctaccccggctctggccggaattatcctggttactccccaagtcacattccccatgcatctcagagtcgagagacagagtatcaccatcgaaggttgcaaaagcagcatttttgtggacgacgcaagaaatatgctcccaagcctcccacagaggacacctatctaaggtttgatgaatatgggagctctgggcgacccagaagatcagctggaaaatcacaaaagggcctcaatgtggaaaccctcgtggtggcagacaagaaaatggtggaaaagcatggcaagggaaatgttaccacatacattctcacagtaatgaacatggtttctggcctatttaaagatgggactattggaagtgacataaacgtggttgtggtgagcctaattcttctggaacaagaacctggaggattattgatcaaccatcatgcagaccagtctctgaatagtttttgtcaatggcagtctgccctcattggaaagaatggcaagagacatgatcatgccatcttactaacaggatttgatatttgttcttggaagaatgaaccatgtgacactctagggtttgcccccatcagtggaatgtgctctaagtaccgaagttgtaccatcaatgaggacacaggacttggccttgccttcaccatcgctcatgagtcagggcacaactttggtatgattcacgacggagaagggaatccctgcagaaaggctgaaggcaatatcatgtctcccacactgaccggaaacaatggagtgttttcatggtcttcctgcagccgccagtatctcaagaaattcctcagcacacctcaggcggggtgtctagtggatgagcccaagcaagcaggacagtataaatatccggacaaactaccaggacagatttatgatgctgacacacagtgtaaatggcaatttggagcaaaagccaagttatgcagccttggttttgtgaaggatatttgcaaatcactttggtgccaccgagtaggccacaggtgtgagaccaagtttatgcccgcagcagaagggaccgtttgtggcttgagtatgtggtgtcggcaaggccagtgcgtaaagtttggggagctcgggccccggcccatccacggccagtggtccgcctggtcgaagtggtcagaatgttcccggacatgtggtggaggagtcaagttccaggagagacactgcaataaccccaagcctcagtatggtggcttattctgtccaggttctagccgtatttatcagctgtgcaatattaacccttgcaatgaaaatagcttggattttcgggctcaacagtgtgcagaatataacagcaaacctttccgtggatggttctaccagtggaaaccctatacaaaagtggaagaggaagatcgatgcaaactgtactgcaaggctgagaactttgaattttttttttgcaatgtccggcaaagtgaaagatggaactccctgctccccaaacaaaaatgatgtttgtattgacggggtttgtgaactagtgggatgtgatcatgaactaggctctaaagcagtttcagatgcttgtggcgtttgcaaaggtgataattcaacttgcaagttttataaaggcctgtacctcaaccagcataaagcaaatgaatattatccggtggtcctcattccagctggcgcccgaagcatcgaaatccaggagctgcaggtttcctccagttacctcgcagttcgaagcctcagtcaaaagcattacctcaccgggggctggagcatcgactggcctggggagttccccttcgctgggaccacgtttgaataccagcgctctttcaaccgcccggaacgtctgtacgcgccagggcccacaaatgagacgctggtctttgaaattctgatgcaaggcaaaaatccagggatagcttggaagtatgcacttcccaaggtcatgaatggaactccaccagccacaaaaagacctgcctatacctggagtatcgtgcagtcagagtgctccgtctcctgtggtggaggttacataaatgtaaaggccatttgcttgcgagatcaaaatactcaagtcaattcctcattctgcagtgcaaaaaccaagccagtaactgagcccaaaatctgcaaccgacgggcttgcccagcccatccagtgtacaacatggtagctggatggtattcattgccgtggcagcagtgcacagtcacctgtgggggaggggtccagacccggtcagtccactgtgttcagcaaggccggccttcctcaagttgtctgctccatcagaaacctccggtgctacgagcctgtaatacaaacttctgtccagctcctgaaaagagagaggatccatcctgcgtagatttcttcaactggtgtcacctagttcctcagcatggtgtctgcaaccacaagttttacggaaaacaatgctgcaagtcatgcacaaggaagatctgatcttggtgtcctccccagcaccttagggccaggggcttacctttcaacctctagagagaccagctgcctttgagaccaggagctgagcaccgagaaccatctgtgagctgccgctgtgatgaaggagcctgctctgaggaacagacaggttgccagtaggcttctagctcaattccctgaagcacgtggtactctgaagcacttgaaaatgggaagcgatgacaaatctgactttaaaaaaaatctttgatttgcactgttatatgcaagaagtggtgaatcacactgagatacgtcgatttggggagagacccccttttgaacttcaaagggttcaagggcaaagacatctgttttaaaaaggtcctttatgacttcaggtcaaagactgagactcagaactttcaaatctggatggaataccttgcctaactgttgcgtggagttcacagttcgactaaccctgtgaacacccaagccaggagttctatgagaagccaaatggtgctcgcaattgtgcttgctgctggactggcaagcttcatgttgtgtttatttggtgtgcgtgtgtctttattattttgtgtaaactatattctgcttatagagagtctctgagactaaaattgacaacttgaaaagtattccaaggaatattatgaaaatagggcaacatggactgtttaagatctccatgtaattgaaattcatgcaaggaaacaactcatagaaaagataaatatggatgcccttcacatgttatcaacctcgtaacttttggtgcttgctgaatcagtccatgaaaagctacagcccgctctttgggaatgctacatacccatttctggtatttaaaaaatatctaggaggagctaaatgacaaaacacagcagtgttttgagggagaaaggaccatcatttataatgctctgtacatactaccagagctgcttggaaaattaaaggccacttgtggctttttcctaccaactgatacgtttaaatttgccctaggattcagctaacagcag

SEQ ID NO: 4481 - DNA, 3549 bp, Homo sapiens
gcttgtacctgctgtgcagtgaggactccaggaactgatgatgaaccggcacggtcctcggcacgtggcaagttctccataagtgggctcagtaaaatccctctcccgggaaagcgccccaccgtgtttggtggggtgactgggacgcgaggatgcggctgggagtgtgatgagaagggcggggatcggcgaggactccaggctggggttgcaggcccagccaggggcggagccttctccgggtcgggcggggacagagcgctcccttggaggcgcccagggacctggccagccgtgcagctgcccaggcgctatggcgagtgcggtcagggggtcgaggccgtggccccggctggggctccagctccagttcgcggcgctgctgctcgggacgctgagtccacaggttcatactctcaggccagagaacctcctgctggtgtccaccttggatggaagtctccacgcactaagcaagcagacaggggacctgaagtggactctgagggatgatcccgtcatcgaaggaccaatgtacgtcacagaaatggcctttctctctgacccagcagatggcagcctgtacatcttggggacccaaaaacaacagggattaatgaaactgccattcaccatccctgagctggttcatgcctctccctgccgcagctctgatggggtcttctacacaggccggaagcaggatgcctggtttgtggtggaccctgagtcaggggagacccagatgacactgaccacagagggtccctccaccccccgcctctacattggccgaacacagtatacggtcaccatgcatgacccaagagccccagccctgcgctggaacaccacctaccgccgctactcagcgccccccatggatggctcacctgggaaatacatgagccacctggcgtcctgcgggatgggcctgctgctcactgtggacccaggaagcgggacggtgctgtggacacaggacctgggcgtgcctgtgatgggcgtctacacctggcaccaggacggcctgcgccagctgccgcatctcacgctggctcgagacactctgcatttcctcgccctccgctggggccacatccgactgcctgcctcaggcccccgggacacagccaccctcttctctaccttggacacccagctgctaatgacgctgtatgtggggaaggatgaaactggcttctatgtctctaaagcactggtccacacaggagtggccctggtgcctcgtggactgaccctggcccccgcagatggccccaccacagatgaggtgacactccaagtctcaggagagcgagagggctcacccagcactgctgttagatacccctcaggcagtgtggccctcccaagccagtggctgctcattggacaccacgagctacccccagtcctgcacaccaccatgctgagggtccatcccaccctggggagtggaactgcagagacaagacctccagagaatacccaggccccagccttcttcttggagctattgagcctgagccgagagaaactttgggactccgagctgcatccagaagaaaaaactccagactcttacttggggctgggaccccaagacctgctggcagctagcctcactgctgtcctcctgggagggtggattctctttgtgatgaggcagcaacagccgcaggtggtggagaagcagcaggagacccccctggcacctgcagactttgctcacatctcccaggatgcccagtccctgcactcgggggccagccggaggagccagaagaggcttcagagtccctcaaagcaagcccagccactcgacgaccctgaagctgagcaactcaccgtagtggggaagatttccttcaatcccaaggacgtgctgggccgcggggcaggcgggactttcgttttccggggacagtttgagggacgggcagtggctgtcaagcggctcctccgcgagtgctttggcctggttcggcgggaagttcaactgctgcaggagtctgacaggcaccccaacgtgctccgctacttctgcaccgagcggggaccccagttccactacattgccctggagctctgccgggcctccttgcaggagtacgtagaaaacccggacctggatcgcgggggtctggagcccgaggtcgtgctgcagcagctgatgtctggcctggcccacctgcactctttacacatagtgcaccgggacctgaagccaggaaatattctcatcaccgggcctgacagccagggcctgggcagagtggtgctctcagacttcggcctctgcaagaagctgcctgctggccgctgtagcttcagcctccactccggcatccccggcacggaaggctggatggcgcccgagcttctgcagctcctgccaccagacagtcctaccagcgctgtggacatcttctctgcaggctgcgtgttctactacgtgctttctggtggcagccacccctttggagacagtctttatcgccaggcaaacatcctcacaggggctccctgtctggctcacctggaggaagaggtccacgacaaggtggttgcccgggacctggttggagccatgttgagcccactgccgcagccacgcccctctgccccccaggtgctggcccaccccttcttttggagcagagccaagcaactccagttcttccaggacgtcagtgactggctggagaaggagtccgagcaggagcccctggtgagggcactggaggcgggaggctgcgcagtggtccgggacaactggcacgagcacatctccatgccgctgcagacagatctgagaaagttccggtcctataaggggacatcagtgcgagacctgctccgtgctgtgaggaacaagaagcaccactacagggagctcccagttgaggtgcgacaggcactcggccaagtccctgatggcttcgtccagtacttcacaaaccgcttcccacggctgctcctccacacgcaccgagccatgaggagctgcgcctctgagagcctcttcctgccctactacccgccagactcagaggccaggaggccatgccctggggccacagggaggtgaggtgggctggatgccacacagatggtctccgtgctggctcactgaagagctgagcctgtggctggcctcagaatcaggctgggtgcagtggctcacacctgtaatcccagcattttgggaggctgagtgagaggatcacttgagctcaggagttcgagaccagcctggccaacatggcaacaccccatttctacaaaaaatttgtaaaattagccaggcatggtggcgcacgcctgtagtcccagctgcttgggaggctgaggtgggagaatcacttgagcccaggagttcgaggctgcagtgagccaggatcatgccactgcactccagcctggtccacagagagacactgtcaccccctttcccccacaagactggcagaggctgggcagcctggggctgatgaagcagagatgttcgctggatcccaggccctggcacccctcaggaaatac

SEQ ID NO: 4482 - DNA, 3577 bp, Homo sapiens
aaaagggacaatgtcccccgagcggtggaggcggcggcggctgcggaggccgcggcaccggcaccgggagcggcagcggcggtagcggcagcgacggccgcaccaaggaggggagctccgagccccggcacctggccggcggcgccgcctccccggcccacaatgccccgctgagccggtgcagcagctgagtggatccaagcagagaaaatccgatggaggggtctctggcaggcagcctggctgcaccagatcgtccccaaggcccagagagactgcctggcccggcgccaagggagaacatcgagggtggggccgaagctgctgagggggaaggtggcatcttccggtccacccgttacctgcctgtcaccaaggagggcccccgagacattctggatggcagaggtggcatctctgtggccaactttgacccaggcaccttcagcctgatgcgctgtgacttctgcggggctggcttcgacacacgggccggcctctccagccacgcccgggcccacctacgtgacttcggtatcaccaactgggagctcactgtctcacccatcaacatcctgcaggagctgctggccacctctgctgctgagcagccccccagccccctgggccgagagcctgggggtccgcctggcagcttcctgacctcccgtcggccccgcttacctctcacggtgccctttccacccacctgggctgaggaccctgggccagcctatggagatgcctcaggcccagagccagcacgagacatccgctgcgagttctgtggtgagttcttcgagaaccgcaagggcctctcgagccacgcgcgctcccatctgcggcaaatgggcgtgaccgagtggtacgtcaatggctcgcccatcgacacgctgcgggagatcctgaagagacggacccagtctcggcctggtggacctcccaacccaccagggccaagcccaaaagccctggccaagatgatgggcggcgcaggtcctggcagctcactggaagcccgcagcccctcggaccttcacatctcacccttggccaagaagttgccaccaccaccgggcagccccctgggccactcaccaactgcctctcctcctcctacggcccgaaagatgttcccaggcctggctgcaccctccttgcccaagaagctgaagcctgaacaaatacgggtggagatcaagcgggagatgctgccgggggcccttcatggggaactgcacccatctgagggtccctggggggcaccacgggaagacatgacacccctgaacctgtcgtcccgggcagagccggtgcgcgacatccgctgtgagttctgcggcgagttcttcgagaaccgcaagggcctgtcgagtcacgcgcgctcacacctgcggcagatgggtgtgaccgagtggtccgtcaatggttcgcccatcgacacactgcgagagatcctcaagaagaagtccaagccgtgcctcatcaagaaggagccaccggctggagacctggcccctgccctggctgaggacgggcctcccaccgtggcccctgggcccgtgcagtccccactgccgctgtcgcccctggctggccggccaggcaaaccaggtgcagggccggcccaggttcctcgtgagctcagcctgacgcccatcactggggccaagccctcagccactggctacctgggctcagtggcagccaagcggcccctgcaggaggaccgcctcctcccagcagaggtcaaggccaaggcctacatccagactgaactgcccttcaaggcaaagacccttcatgagaagacctcccactcctccaccgaggcctgctgcgagctgtgtggcctttactttgaaaaccgcaaggccctggccagccacgcacgggcacacctgcggcagttcggcgtgaccgagtggtgcgtcaatggctcgcccattgagacactgagcgagtggatcaaacaccggccccagaaggtgggcgcctaccgcagctacatccagggcggccgccccttcaccaagaagttccgcagtgccggccatggccgtgacagtgacaagcggccgtccctggggctggcacccgggggcctggccgtggtcggccgcagtgccggaggggagccagggcccgaggctggccgggcagccgacggtggtgagcggcctctggcagccagcccgccaggcaccgtgaaggctgaggagcaccagcggcagaacatcaacaaatttgaacgccgacaagcccgccctccagatgcctccgcagcccggggaggcgaggacaccaatgacctacagcagaagctggaggaggtgcggcaacccccaccccgagtccggccagtcccctccctggtgccccggcccccccagacatcacttgtcaagttcgtgggcaacatctacaccctcaaatgcaggttctgtgaggtggaattccagggccccctctccatccaggaagagtgggtgcggcacttacagcggcacatcctggagatgaacttctccaaagcggaccccccacctgaggagtcccaggccccgcaggcacagacagcggcggcagaggctccctaacacaaaagcattccagatcccctctcgtgccacctctgtctcctcttcttcctcctctgtgtcctcgtccctcttcctctttctttccgtttccaaaggagcaagccaaaacctcaaaccggcgccccttgggggccgggcacactacagccagggcgccgggagccagctagctgcccttcccccagcccgaggactctggggccacagggtgtcttccttcagcccatgcccacctggtccagcaggggcagcagccaggtctctgatggcagccggtctggtcacaggggaggacagcactcccccgtctagcagccaggcagggcgatgtctgccatccgtggccatttgcaaagaccccaaagacccctgttctggttccctctctcccccatgaatatcctctcacacacatgtacatgcgaacacacacaacacgcacctcgtgagacccgggacctgccccggacccccagttcctgggttgaacgaccacatcatgccacggtgcttgctcaggggaagccacgctccctctgtggggcctgctggggcctgggagccccccactgagcccacaatgccacggaaatccttgttggctgcccccgagaggggccttcccagctgggaagagctcagagctgacagctgcctcctgccatgtcaaggccccccaaagagcctcaggggctctggggccctggagggtggggttggggggtgggactctcctcccccactcctgctccctctcccttttcactgttgctttctatgtatagctccctagacctttcacttttttaaaaacgcgttttgtgtagagaataaggaacgtggatctttttattttgcaatcctgggccagctagaagccaggagctgattgaccttttaacttttttcagtggccacattttggttatcgatgtacctagaagtatgtaaattagattaaatttctcttctgg

SEQ ID NO: 4483 - DNA, 3681 bp, Homo sapiens
tgttgaaattcatcttgatctcctgagctcaagagatcctcctcagtctcccaagtagctgagattacagatatctcttccaaatgcacgatgaaggagttcttgtcaacagcgcaaggcaacagagaagtgttccatgcagggacattgcaaatacatgaaagtcatcacaatggagatttttgctaccaggatgttgataaagatattcatgactatgaatttcaatggcaagaagatgaaagaaatggccatgaagcacccatgacaaaaatcaaaaagttgacaggtagtacagaacgatatgatcaaagtcatgctagaaacaagcctattaaagatcagcttggatcaagctttcattcgcatctgcctgaaatgcacatatttcagaccgaagagaaaattgataatcaagttgtgaagtctatccacgatgcttccttggtttcaacagcccaaagaatttcttgtaggcccaaaacccatatatctaataaccatgggaataatttctggaattcttcattactcacacaaaaacaggaagtacacatgagagaaaaatctttccaatgtaatgagagtggcaaagcctttaattacagctcactcttaaggaaacatcagataatccatttagcagacaaatataaatgtgatgtatgtggcaagctctttaatcagaagcgaaacctagcatgccatcgtagatgtcacactggtgagaatccttacaagtgtaatgagtgtggcaagaccttcagtcagacgtcatcccttacatgccatcgtagacttcatactggagagaaaccttacaaatgtgaagaatgcgacaaagctttccatttcaaatcaatacttgaaagacatagtataattcatactgaagagaaaccatataagtgtaatgagtgtggcaagacctttaggcagaagtcaatccttacacgccatcatcgacttcatactggagagaaaccttacaagtgtaatgagtgtggcaagacctttagtcacaagtcatcccttacatgccatcatagacttcatactggagagaaaccctacaaatgtaatgagtgtggcaagacctttagtcacaagtcatcccttacatgccatcgtagacttcatactggagagaaaccttacaaatgtgaagaatgtgacaaagcttacagtttcagatcaaattttgaaatacatcggaaaattcatactgaagacaatgcttacaagtgtaatgagtgtggaaagacctttagccggacatcatcccttacatgccatcgtagacgtcatactggagagcaaccttacaaatgtgaagaatgtgacaaagctttccgtttcaaatcgaaccttgaaagacataggagaattcatactggagagaaaccatacaagtgtaatgagtgtggcaagacctttagtcggaagtcatacctcacatgccatcatagacttcatactggagagaaagcttacaagtgtaatgagtgcggcaagacctttagttggaagtcatcccttacctgccatcgtagacttcattctggagagaaaccttacaagtgtaaggagtgtggcaagaccttcaatcagcagttaacccttaaacgccatcgtagacttcatagtggagagaacccttacaaatgtgaagatagtgacaaagcttacagtttcaaatcaaaccttgaaatacatcagaaaattcatactgaagagaatccttacaagtgtaatgagtgtggcaagaccttcagtcggacgtcatcccttacatgccatcgtagacttcataccggagagaaaccttacaaatgtgaagaatgtgacaaagctttccgtgtgaaatcaaaccttgaaggacataggagaattcatactggagagaaaccttacaagtgtaatgagtgtggcaagacctttagtcggaagtcatattttatatgccatcacagacttcatactggagagaaaccttataagtgtaatgagtgtggcaagaactttagtcagaagtcatcccttatatgccaccatagacttcatactggagagaaaccttacaagtgtaatgagtgtggcaagacctttagtcagaagtcaaaccttacatgccatcgtagacttcatactggagaaaaacaagtgtaatgaatgtggtgaggtttttaatcaacaagcacaccttgcaggtcatcatagaattcatactggggagaaaccttagaaatgtgaagcatgtgataaagtttacagtggcaaatcaagcctcagaagacaggagaattcatactggagagaaagcttataaatgtgaagaatgtcacaaagtttacagtcgcacatcaaaccgtgaaagacaggagaattcatactggagagaaaccataaaaatgtaagagtttgtgacaaggcttttgggcatgattcgcacctggcacaacatgctagaattcacactggagagaaaccttaccagtgtaatgagtgtggcaaagcctttagtaggcagtcaacacttgtttaccgtcaggcaatccatggtgtagggaaactttactaaggtaatgattgtcacaaagtcttcagtaatgctacaaccattgtgaatcactggagaatccataaggaagagagatcatactagggtaataaatgtggcagatttttcagacattgttcataccttgcagttcatcggtgaactcaacgctggagagaaaccttacaaatgtcatgactgtggcaaggtcttcagtcaagcttcatcctatgcaaaacataggagaattcatacaggagagaaacctcacatgtgtgatgatagtggcaaagccttcacttcacacctcatgagacatcagagaatgcatactggacagaaatcttacaaatgtcatcaatgtgccaaggtcttcagtctgagttcactccttgcagaatatgagaaaattcattttggaggtagttggtccatatgcaatgagtagagcaaaccatcaagcattaattgacattagggtcaattcagcattgacttgagtttgtattgacttaacattgagttcaagcattaattgacattagtgtttatgttaagaggattgggccaggcacatcagcttacacctgtaatctgagcgctttgggaggccaaggtgggtagatcacttgaggtcaggagtttgagatcagcctggccaacagacgtgagccattttcccagcctgttttttgtttctttaaaaaaactgatagggatttttatggatatcatgttgaatctaaatcacattgggttattatataatcatttcacaatattaatttttccaagctatcaatatgggttgtagctcaatgtttttaatcattttgatcaatgtttgtagatttcaaggtacaaacttctgacctttgtacgtttatttctaagtatttctttaagttctccagcaaatggaagtgttttaaaattttcttttaaaattgtttattgttaaagtatggaaattcaactaatttttggtgctgatactgtattgtgcaaatccactgactatgttacttagttccagtagtattttggttggctctttgtgattttctacacagaagattatgtcatctacaaacaaatataattttacttcttactttctg

SEQ ID NO: 4484 - DNA, 3498 bp, Homo sapiens
aagccccttgatgtcgatgagtgtggcagcagggagagtccctgccagcagaatgctgactgcatcaacatccccggtagctaccgctgcaagtgcacccgagggtacaaactgtcgccaggcggggcttgtgtgggacggaatgagtgtcgggagatcccgaatgtctgtagccatggtgactgcatggacacagaaggcagctacatgtgtctgtgtcaccgtggattccaggcctctgcagaccagaccctgtgcatggacattgacgagtgtgaccggcagccttgtggaaatgggacctgcaagaacatcattggctcctacaactgcctctgcttccctggctttgtggtgacacacaatggggattgtgtggattttgatgagtgtactaccctggtggggcaggtgtgccgatttggccattgcttcaacacagctggttccttccactgcctctgccaggatggctttgagctcacagctgatgggaagaactgtgtggacaccaatgagtgcctcagccttgcaggaacctgcctaccaggcacttgccagaacctcgagggctccttccgctgcatctgtccccatggcttccaggtgcagagtgaccactgcattgatatcgacgagtgctcagaggagcccaacctctgcctctttggcacctgtaccaacagccctgggagcttccagtgcctctgcccacctggctttgtcctctctgacaatgggcaccgttgctttgacacacggcagagtttctgcttcacccgttttgaggctgggaagtgctcggtgcccaaagctttcaacaccaccaagacccgctgctgctgcagtaagaggcctggggagggctggggagacccctgcgaactgtgtctccaggagggcagtcccaggcccggatgactcccgagaagacgtgaatgagtgtgcagagaaccctggcgtctgcactaacggcgtctgtgtcaacaccgatggatccttccgctgtgagtgtccctttggctacagcctggacttcactggcatcaactgtgtggacacagacgagtgctctgtcggccacccctgtgggcaagggacatgcaccaatgtcatcggaggcttcgaatgtgcctgtgctgacggctttgagcctggcctcatgatgacctgcgaggacatcgacgaatgctccctgaacccgctgctctgtgccttccgctgccacaataccgagggctcctacctgtgcacctgtccagccggctacaccctgcgggaggatggggccatgtgtcgagatgtggacgagtgtgcagatggtcagcaggactgccacgcccggggcatggagtgcaagaacctcatcggtaccttcgcgtgcgtctgtcccccaggcatgcggcccctgcctggctctggggagggctgcacagatgacaatgaatgccacgctcagcctgacctctgtgtcaacggccgctgtgtcaacaccgcgggcagcttccggtgcgactgtgatgagggattccagcccagccccacccttaccgagtgccacgacatccggcaggggccctgctttgccgaggtgctgcagaccatgtgccggtctctgtccagcagcagtgaggctgtcaccagggccgagtgctgctgtgggggtggccggggctgggggccccgctgcgagctctgtcccctgcccggcacctctgcctacaggaagctgtgcccccatggctcaggctacactgctgagggccgagatgtagatgaatgccgtatgcttgctcacctgtgtgctcatggggagtgcatcaacagccttggctccttccgctgccactgtcaggccgggtacacaccggatgctactgctactacctgcctggatatggatgagtgcagccaggtccccaagccatgtaccttcctctgcaaaaacacgaagggcagtttcctgtgcagctgtccccgaggctacctgctggaggaggatggcaggacctgcaaagacctggacgaatgcacctcccggcagcacaactgtcagttcctctgtgtcaacactgtgggcgccttcacctgccgctgtccgcccggcttcacccagcaccaccaggcctgcttcgatgtgaatgaatgtgatgggccccaccgctgccagcatggctgtcagaaccagctagggggctaccgctgcagctgcccccagggtttcacccagcactcccagtgggcccagtgtgtggatgagaatgagtgtgccctgtcgccccccacctgcgggagcgcctcctgtcgcaacactcttggtggcttccgctgcgtctgcccctctggctttgactttgatcaggccctcgggggctgccaggatgtggatgagtgcgccggacggcgtggcccctgtagctacagctgtgccaacacgcctggtggcttcctgtgcggctgtcctcaaggctacttccgggctgggcaagggcactgtgtctccggcctgggcttcagccccggaccccaggacaccccggacaaagaggagctgctctcgtctgaagcctgctacgaatgcaagatcaatggcctctcccctcgggaccggccacgacgcagtgcccacagggaccaccaggtgaacctggccacccttgactccgaggccctgctgaccttgggcctgaacctctcacacctgggccgggccgagcgcatcctggagctccggccggccctggagggtctagagggccggatccgctacgtcatcgtccgcggaaacgagcaaggtttctttcgcatgcatcacctccgtggcgtcagctccctgcagctggggcggaggcggccggggcctggaacctaccggctggaggtggtgagccacatggcaggaccctggggtgtccagccagaggggcagccagggccatggggccaggccttgaggctgaaggtgcagctgcagttgctttagttgggaggagcctcagtgggccccagctgtccagagaagggggattctggaactgggaaggactgatccccagaagcgatggctgaccagattgaaccccgaaactcaggaagagtgaaatgctacacgacaacctcaggcaagcccggcctctgcctgggcctctgtgccagccccgggggccccccagttactcagtctttcctggagacagcaagaagctgcaatgtgcaatccccctgcccccacagccaaggtcaggaagaggccctgtggtcaccgtgtctggccaatctcaggctttcacttctgtactgcactgtggcttgccctggcggggggcagggggttggcaggacatggcaatgggcaactggggtgggcacagggcttattcctcggagtagaagggtgtacagggggcccagactccacagtgacttgccacatttgccccccatttggagaatgcttttatatcaaaagtggagacgataataaagttattttgggtt

SEQ ID NO: 4485 - DNA, 3501 bp, Homo sapiens
cctgaagcgtgttcccagccctgtgcttattaagaagttctctgatacctccaaagccttcatggatatcatgtcagctcaggccagcagcggctccacctctgtcctccgatgggtcctttcctgcctggccacccttctgcggaagcaagacctggaggcctggggctaccccgtgacccttcaggtgtaccatgggctgctgagcttcacggtgcatcccaagcccaagctggtgacagcctgtgccatgcaggcctttcacagcctcttccacgccaggcctggcctgagcaccctgtcagcagagctcaacgcccagatcatcacggccctgtacgactatgttcccagtgaggatgatttacaacccctgctagcctggcttaaggtcatggagaaagcccacatcaacctggtgaggttgcagtgggacctggggctaggccacctccctcgcttttttggaactgcggtgacctgcctcctttccccacactcgcaagtgctgactgctgctacacagagcctcaaggagatcctgaaggaatgcgtggctccccacatggccgacattggctccgtgacctcctcggcctcaggccctgcccaatctgttgccaagatgttcagggcagtggaggagggcctgacgtacaaattccatgcggcctggagctccgtgttgcagctgctgtgtgtcttcttcgaggcgtgtgggagacaggcccaccctgtgatgaggaagtgcctccagtccctgtgtgacctgcgcctctcccctcatttcccccacacggcggctcttgaccaggcagtgggggctgcggtgaccagtatgggacctgaggtggtgctgcaggctgtgcctttggaaattgatggctctgaggagactctggatttcccacggagctggctgctgcctgtcatccgagaccatgttcaggaaacgcgacttggttttttcaccacctacttcttgcccctggctaacaccctgaagagcaaagccatggacctggctcaggcaggcagcacagtggaatctaagatctacgacacactccagtggcagatgtggacactcctgcctgggttctgcacaaggcctacagatgtggccatctccttcaaagggctggcacggacgctgggcatggccatcagcgagcgtccagacctgagggtcaccgtgtgccaggtcctgcgcaccctcatcaccaagggctgccaggcagaggctgaccgtgctgaagtgagtcgctttgccaagaactttctgccgatcctcttcaacctgtatgggcagcccgtggcagccggggacactccagcccctcgccgggctgtgctggaaaccatcagaacttacctcaccatcactgacactcagttggtgaacagtctcctggaaaaagccagtgagaaggtgctcgaccctgccagctctgactttaccagattgtctgtcctggacctggtcgtggccttggctccgtgtgctgacgaagctgccatcagtaagctatactccaccatccggccctacctagagagcaaggcccacggggtgcagaagaaggcctaccgagtgctggaggaggtgtgtgccagtcctcagggccccggggccctcttcgtgcagagccacctggaggacctgaagaagacactgctggactcgctgcggagcacctcctcacccgccaagaggccccgtttgaagtgcctcctacacatcgtgaggaagctctcagctgaacacaaggagttcatcactgccctcatcccagaggtgatcctgtgcaccaaggaggtgtcggtgggcgcacggaagaacgcttttgcactgctcgtggagatgggccatgctttcctaaggtttggctcgaaccaggaagaggccctgcagtgctacctcgtcctgatctaccctggcctggtgggcgcggtgaccatggtcagctgcagcatcctggccctgacccacctccttttcgagtttaaaggtctgatggggaccagtacagtggagcagctgctggagaatgtgtgcctgcttctggcctcccgcacccgtgacgtggtcaagtctgcactgggcttcatcaaggtggcagtgactgtcatggacgtggcgcacctggccaaacatgtgcagctggtgatggaagccattgggaagctttcagatgacatgcggcggcacttccgcatgaagcttcggaacctgttcaccaagttcatccgcaagtttggatttgagctggtgaaaaggctgttgcccgaggagtaccacagagtcctggtcaacatccggaaagctgaggcccgggccaagaggcaccgagccctgagccaggctgccgtggaggaggaagaagaggaggaggaggaggaggagcccgcccagggcaaaggtgacagcattgaggagattttagctgactcagaggacgaggaggacaatgaggaggaggaaagaagccgaggcaaggagcagcggaagctggcacgacagaggagccgggcatggctgaaagagggcggtggggatgagcccctcaacttcctggatcccaaggtggcccaacgagtcctggccacgcagccagggccaggccggggcaggaagaaggaccacggcttcaaggtgagcgccgatggccggctgatcataagggaggaggcagacggcaacaagatggaggaagaggaaggtgccaaaggcgaagatgaagagatggctgacccaatggaagatgtgatcatcaggaataaaaagcaccagaagctcaagcaccagaaagaggctgaggaggaggagctggagataccccctcagtaccaagctggaggctctggcattcatcgccctgtggccaagaaggctatgcctggggctgaatacaaagccaagaaagcaaaaggtgatgtgaagaagaaaggccggccggatccctatgcctacatccccctcaacagaagcaagctcaaccgcaggaagaagatgaagctgcagggacagttcaaaggcctggtgaaggctgcccagcgaggttcccaggtgggacacaaaaaccgcagaaaggatcgtcgaccctgaggcccagggcccctgggctgccctgtggtccagtctgaggccctttcagcccccaggctgccttgccaccagctccaggtgctcaagattctggcagagcctggactcaggatgacttggaactagggcttggctctcagaagtcctgggttttggaaactccaaatggaatcacccttcagagacatccctggtgcctggagatgggaatgtggcctcagtgcctctgagtaggtgccatgaggcacctttgctttctgcccagagtggccatgagcaccagaacagatgatctccatttccgccagctgcctgtagccacgtggcatcctgcctgtggtctgggtgagatttactgtgaccagatgtagaataaatgtgtctcatcctgc

SEQ ID NO: 4486 - DNA, 2475 bp, Homo sapiens
ctctctacacagaatcggctgttgagtgtgctctcagtggagctttggttttagctgttctctgacaaagagcttgttctgagctgcacatctcgtcctctttgttcagcctcaggcttcaagcattgaatcctaaatattctccagctgggaatcagacaagggcagaaatgaagaacccagaagcccagcaggatgtttcagtttcccagggatttcgcatgttgttttacacgatgaaacccagtgaaacttcattccaaacattagaagaggtgcctgattatgtaaaaaaggcaactccatttttcatttctttgatgctgcttgaacttgttgtcagctggattctcaaaggaaagccaccaggtcgcctggatgatgctttaacgtcaatctcagctggtgttctgtctcgacttccaagtctatttttcaggagcattgaactgaccagttatatttatatctgggagaactacaggctgttcaatttgccttgggattctccatggacttggtattcagccttcttaggagttgactttggctactactggttccatcgtatggctcatgaagttaatattatgtgggccggacaccaaacacatcatagttctgaagactataacttatccacagcactgagacagtctgtcctccagatatatacttcctggattttctactctcccctggccctcttcatacccccttcagtatatgctgttcatcttcaattcaatcttctttaccaattttggatccatacagaggtcatcaataaccttggtcctttggaactgattcttaatactcctagccatcatagggttcatcatggcagaaatcgttattgcatagacaaaaattatgctggtgttcttattatttgggataaaatttttgggacatttgaagcagaaaatgaaaaagttgtatatggcttaacacatcccattaatacatttgaaccaatcaaagtgcagttccatcacttattttccatatggactacattctgggccacacctggattcttcaataagttttctgtcatatttaagggaccgggatggggtccaggtaaaccaagacttggtctcagtgaagaaattccagaggtcaccggcaaagaagttcccttctcatcatcttcatctcagctattaaagatatatacagttgtacagtttgctctgatgttggcattttatgaagagacctttgcagatacagctgcactgtcgcaagttactctccttctgagggtttgcttcattatcctgaccttgacttccattggatttcttctggatcaaagacccaaggcagctattatggaaactctccgttgcttgatgttcttaatgctgtaccgatttggtcacctgaagcctcttgtcccttcattgtcatctgcttttgagattgttttttccatttgcattgctttctggggagttagaagcatgaaacaactcacctctcacccttggaaataacctgaatttgtacataattctcttcttttaatgagttgtccacacgcatattatgactgcatattaaaatgtaattattttatgtaatgcttatatgaactatttcttcaatgaaaagtaaaattacttatttactattgtttgcctttcacatttgttattttctattaaaaattaaagtcagttttggttacttcccccctttactacaattaaaaaaagatttcaaatataatgatgttatattaactgatagccttatatgacaagtataaaaagaagggatgaaacttaaaaacagtaaaaacaagaaggaatattgcctttacatcaatttgaaaacaatgtttcctttgatgtttgctaaaattatgcatagatacatgtttgtagtcataaaaatgtattacattggttgtcttcctaaggccacagttacctttgcaatccatataacctaagaagctgcattccagaaaaagacatcactgaggccaggcgcggtggctcacccctgtaatcccagcactttgtggggctgaggtgggcggatcatgaggtccagagatagagaccatcctggccaacatggtgaagtcctgtctctactaaaaatataaaaatttagctggacatggtggtgtgcgcctgtagtcccagctactctggaggctgaggcaggagaatcgcttgaacctgggaggcagaagttggagtgagtggagattgcaccactgcactccagcctgggcgacagagcgagactccgtctcaaagaaaaaagacatcactgaaagaaaaatgaacagaatttgtcagaattagttttttcaacaggttactttgtcatacatttctctaatatgcttggtcaatttgttttggcagactgggcagcatgcagcaattctgcattatttaaagttatcagaacaatgttaattctctaaataaaattacccaaggt

SEQ ID NO: 4487 - DNA, 2321 bp, Homo sapiens
cagggaaaaatacttgcaaatacgtttataacatacactactcagacagatggagatacacgtgaattagagcgaacaaaacaatatgtaaatgaagcttttcaagcaggggctatgacatgcctaatttgtattgcttcggtgaagagaaaccaagcagtttggagctgttcgggatgtttctgtatatttcacatgccctgtatccagaagtgggctaaagacagccagtttcttgtatcttctgtgactgatgatgattttggaaagaaagattgtccctggccttgtccaaaatgtaggtttgaatacaaacgatctgaaacacctagtaggtactattgctattgtggaaaagtagaagatccacctttagatccgtggcttgtgcctcattcatgtggccaagtatgtgagcgtgaatttaaacctccttgtggccataaatgtttactcctctgtcatccaggtccctgccctccttgtccaaagatggtcacaactacttgttactgtaagaaagcaaaacctatccctcgtaggtgcagtgccaaggaatggtcttgtcagctgccatgtggacagaagttgctttgtgggcaacataagtgtgaaaatccttgtcatgcaggaagctgtcagccttgtccaagagttagtagacaaaagtgtgtctgtggcaaaaaagtagctgaaagaagttgtgcaagtccactatggcactgtgatcaagtatgtggaaaaacactgccatgtggtaatcacacatgtgagcaagtttgccatgttggtgcttgtggagaatgtcctcgatctgggaaaaggttctgtccatgtcagaaatcaaagttttctttgccttgtacagaagatgtaccaacttgtggagacagttgtgacaaagtacttgaatgcggaatccatagatgttcacagcgttgtcaccgaggtccctgtgaaacatgtagacaagaagtggaaaagcattgtcgctgtggaaagcatacaaaacgaatgccttgtcataaaccttatctgtgtgaaactaagtgtgttaagatgcgtgactgtcagaagcatcaatgtagaagaaagtgttgccctggaaactgtccaccttgtgatcaaaactgtggacggactttaggatgtagaaaccataagtgtccatctgtctgtcacagaggcagttgctatccctgcccagaaactgtagatgtgaagtgtaattgtggcaatacaaaggtgacagtgccctgtggccgagaacgtaccacaagaccacccaagtgcaaggagcaatgcagtcgaccaccaacttgtcatcatacaagtcaagaaaaacatcgctgtcactttggttcttgtccaccatgtcatcaaccttgccaaaaagttttggagaaatgtggtcacttgtgtcctgctccgtgtcatgatcaagcgttaataaagcagactggcaggcaccagcctacaggcccttgggaacagccttctgagccagcatttattcagactgcattaccgtgtcctccatgtcaagttcctattcctatggaatgtcttgggaaacatgaggtgagtccactaccatgccatgctgtaggaccctactcttgtaaaagagtttgtggaagaatcttggattgtcagaatcacacatgtatgaaagaatgccacaaagtaaccaaaactgatggctgcactggaaaaaacaaggctggcccagaatgccttcattgtgaggaagggtgctccaagtcacggccactaggttgtcttcacccatgtattttgcgatgtcaccctggagaatgtccaccttgtgttcagatgcttagaataaaatgtcactgtaagatcacaagcctgtatgtggaatgtagaaaaataaccacagctgatgtaaatgaaaagaacctcctcagttgttgcaaaaatcagtgccctaaagagcttccttgtggtcatagatgcaaagagatgtgtcatcctggtgaatgtccctttaactgcaaccagaaggtaaaacttagatgtccttgtaaaagaataaaaaaggaattgcagtgcaacaaagtacgtgaaaatcaggtttcaatagaatgtgacacaacgtgcaaggaaatgaagcggaaagcatctgagataaaagaagcagaagccaaagctgctcttgaagaagaaaaacgaagacaacaggctgaactagaagcttttgaaaacagactgaagggtcgtcggaagaagaacaggaaaagagatgaagtggcagttgagctatcactatggcaaaaacataaatattatctcatttc

SEQ ID NO: 4488 - DNA, 2495 bp, Homo sapiens
ttgaccctggggtatgtgtgtgtgaggacatgtctctgtctctctgtttttcatgtcactctcttgacgtgtcagtctgtctcatgtccccatctgtcccttttttttttttttgaaatggagtcttgctctgtcacccaggctggagtgcagtggtgcaatctcggctcactgccagctccgcctcctgggttcatgccattctcctgcctcagcctcctgcgtagctgggactacaggctcccgccaccacgtctggctaattttttgtatttttagtagagacagggtttcactgtgttagccaggatggtctcaatctgacctcatgatctgcccgcctcggcctcccaaagtgctgggattacaggcctgagccaccatgcccggcccccatctgtccctttctgccatctccatgtctctaagtctgcatctatttcttctacctctgagtctgtatttcttttcttcccttcttcattttcagtctctgcttttgtgtctcctagtctccaggttttgtgtctccatctctctgacttgcatctccatgtcttcatttgtccttttctccatgtctctgggtcgccatcacttactgcctaccaaaagcccctaccctcatgcttatacatctcttctctccctgcctcagtttaacccagaactggtgctggtctcagctggctttgatgctgcacggggggatccgctggggggctgccaggtgtcacctgagggttatgcccacctcacccacctgctgatgggccttgccagtggccgcattatccttatcctagagggtggctataacctgacatccatctcagagtccatggctgcctgcactcgctccctccttggagacccaccacccctgctgaccctgccacggcccccactatcaggggccctggcctcaatcactgagaccatccaagtccatcgcagatactggcgcagcttacgggtcatgaaggtagaagacagagaaggaccctccagttctaagttggtcaccaagaaggcaccccaaccagccaaacctaggttagctgagcggatgaccacacgagaaaagaaggttctggaagcaggcatggggaaagtcacctcggcatcatttggggaagagtccactccaggccagactaactcagagacagctgtggtggccctcactcaggaccagccctcagaggcagccacagggggagccactctggcccagaccatttctgaggcagccattgggggagccatgctgggccagaccacctcagaggaggctgtcgggggagccactccggaccagaccacctcagaggagactgtgggaggagccattctggaccagaccacctcagaggatgctgttgggggagccacgctgggccagactacctcagaggaggctgtaggaggagctacactggcccagaccacctcggaggcagccatggagggagccacactggaccagactacgtcagaggaggctccagggggcaccgagctgatccaaactcctctagcctcgagcacagaccaccagacccccccaacctcacctgtgcagggaactacaccccagatatctcccagtacactgattgggagtctcaggaccttggagctaggcagcgaatctcagggggcctcagaatctcaggccccaggagaggagaacctactaggagaggcagctggaggtcaggacatggctgattcgatgctgatgcagggatctaggggcctcactgatcaggccatattttatgctgtgacaccactgccctggtgtccccatttggtggcagtatgccccatacctgcagcaggcctagacgtgacccaaccttgtggggactgtggaacaatccaagagaattgggtgtgtctctcttgctatcaggtctactgtggtcgttacatcaatggccacatgctccaacaccatggaaattctggacacccgctggtcctcagctacatcgacctgtcagcctggtgttactactgtcaggcctatgtccaccaccaggctctcctagatgtgaagaacatcgcccaccagaacaagtttggggaggatatgccccacccacactaagccccagaatacggtccctcttcaccttctgaggcccacgatagaccagctgtagctcattccagcctgtaccttggatgaggggtagcctcccactgcatcccatcctgaatatcctttgcaactccccaagagtgcttatttaagtgttaatacttttaagagaactgcgacgattaattgtggatctccccctgcccattgcctgcttgaggggcaccactactccagcccagaaggaaaggggggcagctcagtggccccaagagggagctgatatcatgaggataacattggcgggaggggagttaactggcaggcatggcaaggttgcatatgtaataaagtacaagctgttaaaaaaaaaaaaaaaaac

SEQ ID NO: 4489 - DNA, 2725 bp, Homo sapiens
ggaggcctggaccaaggtggagttagtgggatggaggaagtggaagaaggcatgggattttggaggctagagcctgcattggtggtgaactggatgtcatagaggagggaaggaaaaggaaccaggaagagaagaactctctgaattgggcacgcacatctctgatgggcaccgatgaggattgttaccaggaacgaggagactgggatcaggaaagtggctttgggagggaggaaccaaggcttctcttttggatgtgtcaagatagatctgccttcgagaaatccgagttgtggtatcaaatagccagttggatatgtgagactggagtttgggggaaagagaggccgtggctcaaaaacgtaagttttggaaacgtcaacataaagccacaggattgggtgacgtggcctagcaggggggtggggacagagaagcgaccctggccagagccttggggacatctacatctgggggagaaggggatgtagcaaaacgagcttaggagtgatctcgaggtaggctgaaaccaggagggttacagagggcaaatgcacctttgtgtttcaagaaggagaggagacagccagctgtgccaagggctgctgagacttggacaaggatgcagagagcagagtgaccattaggtctgatgacatggacagggttggtgatcttgataagataagatgtcagttcagtgcagtggtggggacagaagccctgctggagtggaggggagagagaatttggggggaagacagaaggaaagggaattcaggcaagtgtgtgtgtgtgtgtgtgtgtgtgtgtgtaactgacacaaaggccaggtgcgatggctcacgtgtgtaatcccagcactttgggaggccgaggtgggtggatcacttgaggtcaggagttcgagaccagcctggccaatatggtgaaaccccgtctctactaaaagtacagaaattagacaggtgcggtggtgcacacctgtaatcccagctacttgagaggctgaagcaggagaatctcttgggcccaggaggcagaggttgcagtgagccaagatcacaccactgcactctagcctgggtgacagagcaagactctgtctcaaaaaaagaaaaaaggtaaaaaaaaaaaaaaaatgaccctgaaaggaagtagggagacatgcagatagggagatgggaggcagaaaattgcatcctgcaattagctgtcacagcaggcaggagcaagagagatggggaagcccagggccaggaggggaagatgaattcagggggcagggaagagaggatgctgtcagctaggctctggcagatcccctagccagggatgctctgcccagctcctgtctcttgctgctgtcagcgccgggcacactctgggattccccctgtagaccctgtcaagacctattgaggtgaaggggaagaacacgttttcatcattcattttcagaaataaacattcactcagttcttggaaatactttctggccaggcttgggggctcatgcctgtaatcccagcactctgggaggccaagacaggaggattgcttgaggcttggcgtttgagaccagcctgggcaatatagtaagaccccgtctctacaaaaatgaaaaatgagctgtggcgtggtggctcacgcctgtagtcctagatactcgggaggctgaggcgggaggattgcttgagtccaggagtttaaggttgcagtgagctatgattgcaccattgcacttcaggctgggccacagagcaagaccctgtctcagaaaacagaaagaaagaaagtcaaagaaataaagtcaaagacaagaaggtgatacagagaagacagaaaaggaggaggagagagactgacaggtacacaaatcagagaagtcccagagataacaaaaacacaaccacagagatagggagacgtaagccggagaaagacccagagattcgcatagaaagcaacgtggagactcagaagcaagcacagcatcaaggaatgatcaataaaaagaaaaaaaatatttcctgaggacttccaagtacaaggccctgcaatctcaggccacttctgtcccatctctgccttcagagggggggacaggtagtccagacaattagaatacagagggggctgtgttctgacggggccacgcgggcattgaggaaacgcagcaggcccctcccctagctggggcggggatgtctgtgtgccatcatctcactccatctggtcattcctttgcccattcatccatccattcattcaagtcaccccatgcacattttccaagactgcctgtgacctggccctgtgccgggtagagctgaggatgccaaggtgaattcctcctgtgcctggccccggccccagtctgctggaagaaccagacacagacaatcacactgcggggaaacacgtgctccatcggaaaagtccagagcagggggtgggcagagaggcccagcgtgcaccagagcctcgctcaggtcagcgccaggcctgcctggagcagccaactgtgggagaagaaggagttggtgaaaggtgggtcccacctgggccgtccacagaagggctgaggggtagggggtgaggggttgaagatcaggccctgccgccatgccacacggctgtcctctgtccctgctcctgggggagctgaaactgcatggaaggtcccccaggggtgccccgtctaataaactcgatgaagagg

SEQ ID NO: 4490 - DNA, 2136 bp, Homo sapiens
aggccgaattggcgggagaataggtttggtggtccgagatccgaggcaacggtggctcctcgaggtccacggtcccgggagtaatgtgaggattcttgcttttctggaagctaacacatagtcagtgccaaagtagtgacagaagaaatcttgagaggaagcatttttgtcttgtacttgaaacagctgctgggcccaccatggctcctgtgaagatcagccatgtggtatcattttcttctcaggatcccaagtatcctgtagagaacttgctaaacccagatagtccaaggagaccttggctcggctgccctcaggacaagagtgggcaattgaaagtagaactacagctggagagggcagtgcccactggctacattgatgtgggtaactgtggctgtgcgttcctgcaaattgatgtgggccattcttcctggcccctggacagacctttcataaccctgctccctgcaaccacgctaatgtctctaactgattcaaagcaggggaagaaccgctccggggtccgcatgtttaaagatggtaaagagggcaaaagcagaaaagatgggggtggtctttatgagaaacagagatgcagtactaaagaggactgtgagtgctattaggtgtagactgtgggggggagcctgtgcaggggtttaattatatctgttgggggcaaagggtggttaaggaatggtgtgcttgtgtgtgagatttgtgtggtgaggatgcatgctagctggggagatggagatttatgaactatttatatttatatataacttgtggttcggtagggcccaatatatagaacacacacacttattgattaatatatttttgtggccaggcgtggtggctcatgcctgtaatcccagcactttgggagactgggacaagtggatcatctgaggtcaggagttcgagaccagcctggccagcatggtgaaatcccatctctactaaaaatacaaaaattagccgggcatggtggtgagtgcctttaatcccagctactggggaggctgaggcggcagaattgcttgaacctgggaggcagaggttacaatgagccaagattgggccattgcactccagcctgggtgacaagagtgaaactctgtctcaaataataataataataataacaataatatgtttttgtgggtataagtgtggatgtaggatagatgtttatgtaagtgatggaaggctacatagtggttatagttgtgtagcatataatgtttactgaatttatacaaatctctgttcactaggcactacagaaaaacataagatctgattcctagcctctagggatgtacagtctcataaggatttgtctgttttaagttggaagtatttgtaatgttgtaaaggaagagtgacattggaggggcatatgatttggagaaagtgaggtactgactggacagtgttaggaactaaagatgtggagggttggtgatatcggaatgtgataccgtgagcatgtagagcacgtggtggtgtgagggaggttgaggtcttatgatccaggaagggccaatatatatctcatcaacaaccgactaatcaccacccaacaatgactaatcaaactaacctcaaaacaaatgataaccatacacaacactaaaggacgaacctgatctcttatactagtatccttaatcatttttattgccacaactaacctcctcggactcctgcctcactcatttacaccaaccacccaactatctataaacctagccatggccatccccttatgagcgggcgcagtgattataggctttcgctctaagattaaaaatgccctagcccacttcttaccacaaggcacacctacaccccttatccccatactagttattatcgaaaccatcagcctactcattcaaccaatagccctggccgtacgcctaaccgctaacattactgcaggccacctactcatgcacctaattggaagcgccaccctagcaatatcaaccattaaccttccctctacacttatcatcttcacaattctaattctactgactatcctagaaatcgctgtcgccttaatccaagcctacgttttcacacttctagtaagcctctacctgcacgacaacacat

SEQ ID NO: 4491 - DNA, 1907 bp, Homo sapiens
ataactccaacgctcaagcaagtcaaggacacccacggactcaacaccgcgaccagattggaaaaggtgttggtcgacaacttctgcatttgcgaagagtgcagcgtccctcgctgtctcatgtatgagatttacgtggagacctgtgggcaaaacactgagaaccaagtcaacccggccacctttgggaagcttgtgagattggtttttccggaccttggcacccggtggctgggcactagaggaagtgccaggtatcattatgatggaatctgtatcaagaaaagctctttcttctatgcccagtattgctgcctgataggtgaaaaaaggtatcacagtggagatgccattgcctttgaaaaatctactaattataacagcattatccaacaagaagcaacatgtgaagatcattcaccgatgaagacagacccagttggatcccctttgtctgaattcaggagatgtccatttctggagcaagaactggcaaagaaatactcctgtaatatgatggccttccttgctgacgaatactgcaactattgtcgagacattttacgaaatgtgaggaactgagaacttgagagggtggaggacttgcttacttccttctggaagtctctgcagcaagacacagtcatgctgatgtcattgcctgacgtgtgccagctctttaaatgctacgacgtccagctgtacaagggaattgaggatgttctccttcatgacttcttggaagatgtttctattcagtacctgaaatctgtgcagttatttagtaagaaatttaagctgtggctccttaatgctttggaaggtgttccagccctcttgcagatctccaaactcaaagactatgcgaatggtattgaaaagtaagaggcgtgtcagcgttttgaagtcagatctacaggccatcatcaatcaaggcactttggctacttctaagaaagccctggcaagtgaccggagtggcgcagatgaactggagaacaacccagagatgaaatgtttaagaaacttaatttctttgctgggaacatcaacagatctcagggtattcctcagctgtctgtcttcacatctccaagcatttgtgttccagacaagcagaagcaaagaagagtttaccaaattggccgccagcttccagctgagatggaatcttcttctcactgctgtaagcaaagccatgaccctctgccacagagatagttttggctcctggcatctgtttcacttgttgcttttggaatatatgattcatatacttcagtcatgcctagaggaggaagaggaggaggaggacatggggactgtcaaggaaatgctaccagatgacccgactctcggccagccagaccaggcacttttccattctctgaattcctcactgtcgcaggcgtgtgccagccccagcatggagccactgggggtgatgcccacacacatgggccagggccgatatcccgtgggcgtgagcaacatggtcctcaggatcctgggcttcctggtggacactgccacgggcaataagctcatccaggtgctgttggaagatgaaaccactgaaagcgcagttaaactcagccttcctatgggacaagaagccctcataaccctaaaagatggacaacaatttgtgattcagatatcagatgtaccccaaagctctgaagatatttatttcagagaaaacaatgctaatgtgtgagattatttatttgaatagagaataagaaaactgatagacttgcattcttaaaaatattaaatactaaagtttttctattgacgaaagatgatgttatgtatataatagatgtagcattgtctattttatgtttatatgtatttcaaggaggtggtttcgataaaatatgtaaactgatttggagaat

SEQ ID NO: 4492 - DNA, 2605 bp, Homo sapiens
atttgtccctggtggtcccgcggacccctcgtccctccgcagtctccggctggcagcgatggagggcgctggggagaacgccccggagtccagctcctctgcccctgggtccgaagagtctgccagggatccacaggtgccgcctccggaggaagaatcgggggactgcgcccggtccctggaggcggtccccaagaaactctgtgggtatttaagtaagttcggcggcaaagggcccatccggggctggaaatcccgctggttcttctacgacgaaaggaaatgtcagctgtattactcgcggaccgctcaggatgccaatcccttggacagcgtcgacctctccagtgcagtgtttgactgtaaggcggacgctgaggaggggatcttcgaaatcaagactcccagccgggttattaccctgaaggccgccaccaagcaagcgatgctgtactggctgcagcagctgcagatgaagcgctgggaattccacaacagcccgccggcacctcctgccacccctgatgccgccctggctgggaatgggcccgtcctgcacctcgagctagggcaagaagaggcagagctggaggagttcctgtgccctgtgaaaacaccccctgggctagtgggcgtggcagctgccttgcagcccttccctgcccttcagaatatttccctcaagcacctggggactgaaatacagaacacaatgcacaacatccgtggcaacaagcaggcccagggaacaggccatgaacctccaggggaagattctccacagagtggggagcctcagagggaggagcagcccttggcctctgacgccagcaccccagggagagagccagaggattctccaaagcctgcacccaagccttctctgaccatcagtttcgctcagaaagccaagcgccagaacaacaccttcccattcttttctgaaggaatcacacggaaccgaactgcccaggagaaagtggcagccttggagcaacaggttctgatgctcaccaaggagttaaagtctcagaaggagctagtgaagatcctgcacaaggcactggaggccgcccagcaggagaagcgggcgtccagcgcatacctggcggcggctgaggacaaggaccggctggagctggtgcggcacaaagtgcggcagatcgcggagctgggccggcgggtggaggccctggagcaggagcgggagagcctggcgcacacagcgagcctgcgggagcagcaggtgcaggagctacagcagcacgtgcagctgcttatggacaagaaccacgccaagcagcaggtcatctgcaagctctctgagaaggtcacccaggacttcacgcacccccctgaccagtctcctttgcgccccgacgctgccaacagggacttcctgagccagcaggggaagatagagcacctgaaggatgacatggaagcttaccggacccagaactgcttcctcaactccgagatccaccaggtcacaaagatctggagaaaggtggctgagaaggagaaggcccttctgacgaagtgcgcctacctccaagccagaaactgccaggtggaaagcaagtacctggccggtctgagaaggctgcaggaggccctgggggacgaagccagcgagtgctcagagctgctgaggcagcttgtccaggaggcactgcagtgggaagctggggaggcctcatctgacagcatcgagctgagccccatcagtaagtatgatgagtacggcttcctgacggtgcccgactatgaggtggaagacctgaagctgctggccaagatccaggcattggagtcacgatcccaccacctgctgggcctcgaggctgtggatcggccgctgagggagcgctgggttgccctgggcgatcttgtgccctcagccgagctcaagcagctactgcgggcaggagtaccccgtgaacaccggcctcgtgtctggaggtggctggtccacctccgtgtccagcacctgcacactccaggctgctaccaggaactgctgagccggggccaggcccgcgagcaccctgctgcccgccagattgagctggacctgaaccggaccttccccaacaacaaacacttcacctgcgggagctggagcagcttaaggcagagtacctggggaggcgggcatcccggcgcagagctgtgtccgagggctgtgccagcgaggacgaggtggagggggaagcctgacttggccacctcccctccccacagccttcctcacccttggctggcagacccactggaggtcaggcacggaccagtggcccagccctgggtgtcccatcaccatgtgaccttggacatgtcccttcccctctctggccctcagtttccccactgggacattgtgtgctgcaaagccattggttgggctacttcttcataggcacttacttacccagggatgccaccctttcgtcacctcttccacagagcactttggcatgtaaacaagcaagagcactgcctctatagggtaacctggaacattctctaggttatatcaatataaaacaatgtaaatggtggaaatcattcataagctttggaacttaaacagttctcagtt

SEQ ID NO: 4493 - DNA, 3367 bp, Homo sapiens
gtgccttagccagggacctgcttggccagcgacagatcctttgctgctctgtctgccggttcttgaggtgaatgtcggaatccattatctttcgggaaagctctctggggcagggagcgtcctggggagttggaattcagaaggaatctctcagacgcaaatctccatctcctccctgcctcacctgggcagccttttcagactgtctctgcccagaatgtcaggagaggccacagtcttggcctaccatgctccagaagaacaggaaggacttctagttgtcaaggttgaagaagaaaattatgttttggaccaggactttggccttcaggaaaacccctggagccaagaggtattccggcagaagttcaggcagtttagttactctgactccactggccctcgggaggctctgagccggctgcgagagctttgctgtcagtggttgaggccggaggtgcactccaaggagcagatcctggagctgctgatgttggagcagttcctggccatccttcctgaggagctgcaagcttggctgcgagagcatcggccagagaatggagaggaagctgtgactatgctggaggagctggaaaaagaactggaggagccaaggcaacaggacacaactcatggccaagaaatgttctggcaggaaatgacatccacaggagcactgaagtctctgtctctgaatagcccggtgcagcccttagagaaccagtgcaagactgagactcaggagtcccaggctttccaggagagagatggggtctcactctgtcacccaggttggagtgcagtggtgcaaccacagctcactgcagtagccttgaacccctgggttaaagtgatcctcctgcctcagcctccagagtagctaggactacagttgtacaccaccatgcctggctaaatatccataatattcaaagctcagtattctgttatttaattttggcttcattggcaagacagtccctaagatggagatgaatacattttcagtaatagaaaccacataatcatttgaacagggaaagtttaatgttaagaattattaactactaagtgttataacaaaaagtgaaactcaaaagaatacagcaataacagatatagagtgtctctagggctgaggcagaacatcaaaggtaagaacaaatttgcaggagggtgccacaacttcccctttcctgccaggtcttagatccaggccttgttggagagggcacagccacagcccactggatggagatgccactgcagtgctgagctggcagaactcactgaggagccacactctggggtgctagaagctccccatggggagctgacctggtacagaacttgctgggaagctacccatagggatggggcctttggaactcattgggatgtgcactgctgggtgtcccatgtgctacagaaacaaacacaaagaacatgccagaaccaggaagaaaagccctttcttccagttcctctgcaaccccctctattgataaagctcacagcatgccagctggcaaatagtccagtatcacagacagggcaatgaagcgtagatttgaaactgaggcaataaattgatagctgtcacagatgccagggattagaactgaaaggactttgattatgttattggcaaaatcatccttatgggcagcagatatatcaggtataccagcttgttctcattaatcttttgttaaatctgactacccttctgattttgtcttcaccaagcaatcttattaacttcctatgaagcttagctgtaataagaaaattgcatttgttcagtctggtccatgtgatggttacattactcattaattctcattctgtttttattactgagtttcacgggcttagttattaagagtctaccccaagagataaatctattttttgtatgatgataaaattaggtatatgaggacctaagcccaaaggccagaccctggacttcggcagttcaccaaaggaatccataccatccatccactgaattcttctgggaaactgcttcccaaccttccccaggcatcataccctgatactaccattagccaagcaggccctcttaagtatcttctgcaccaagcaggtgctacattaaaacgggttttgaaaattcatctcaaggaaatcaagctgtctctatttgcagataatatgatcccatgtctagaaaaccctatcgtctcagccccaaagcttcttaagccaagaagcaactacagcaaagtctcaggatacaaaattaatgtgcaaaaatcataagcattcctatatacagagattcctatatctctgtgtctgtactgcacacctgaacaacaatagacaaccagagagccaaacatgattaactcccattcacaattgctacaaagagaataaaatacctaggaatacagctaacaagggaggtgaagggcctcttcaaggagaactacaaaccactgctcaaggaaatcagagaggacacaaacaaatggagaaacattccatgcttatggataggaagaattaatatcatgaaaatggccatactgcccaaagtaatttatagattcagtgttattcccattaaactaccattgacattcttcacagaattagaaaaaaatactttaaaattcatatggtacaaaaaaaagagcccttatagccaagacaatcctaagcaaaaagaacaaagctggaggcatcatgccacctgccttcaatctgtactacaaggctactataacccaaacagcatggtactggtacaaaaacagacacatagaccaatggaacagaatagagatctgagaaataagactgcacatctacaaccacttgatatttgacaaacctgacacaaacaagcaatggggaaaggattacctatttgataaatggtgctgggaaaactggctagccatatgcagaaaactgaaactggatccctcctttacaccttgtacaaaaataaactcaacatggactaaagacttaaatgtaaaacccaaaactataaaatccctagtaaaaaaatctaggtaataccattcaggacataggcatgggcaaagatttcatgatgaaaatgtcaaaagcaattgcaatagaagcaaaaattgacaaatgggacgtaattaaagagcttttgcacagcaaaagaacctattataagagtgaacagacaacgtacagaatgggagaaaatttttgcaatctatccatctgacaaaggtctaatatccaggatctacaagaaacttaaacaaatttacaagaaaaaaacaaccccattaaaaagtgggcaaaggacatgaacagagacctcaaaagaagacatttatgcacc

SEQ ID NO: 4494 - DNA, 3462 bp, Homo sapiens
gagcccgggagcacttccgccctgttgtgaagtgggtgtctcgagccttggggagcagtcccttttctaggagcctcttgaaggactcaccgtagatgcaggaagacattggatgaggtcagcatagctgaagtgaggtgtctgggttagacaatggctatggccctggaattgcaagcccaggcatctccgcagccagagcctgaagaactcctgattgtgaaactggaagaggactcttggggatcagaatccaaactctgggagaaggaccgtggctctgtctctggcccagaggcctcccgccagcgcttcaggcaattccaatacagggatgcagctggaccccacgaggccttcagccagctctgggctctctgctgtcgttggctgaggccggagatccgtctcaaagagcagatcctggagctgctcgtgctggagcagttcctgactatcttgcctagggaggtccagacctgggtgcaggcacgccaccctgagagtggtgaggaggctgtggccttggtggaggattggcaccgagagaccaggactgcaggacagtcgggactggaattgcatacagaagagaccaggcccttaaagacaggggaagaagctcagagcttccagctgcagccagtggatccctggcctgagggacagtcccagaagaagggggtgaagaatacatgccctgaccttcccaatcacctaaatgccgaggtggcaccacagcctttgaaagagagtgctgtcctcactccccgagtccctactctcccaaagatggggagcgttggagattgggaggtgacagctgagtcccaggaagccctgggccctggcaaacatgctgagaaggagctctgtaaagaccccccaggagacgactgtgggaacagcgtgtgcctgggagttccagtttcaaaaccaagtaatacctccgagaaagagcaaggaccagagttttggggtctaagtcttataaattctgggaaaaggagcactgcagattacagcctggataatgagccagctcaggcattgacctggagggattcaagagcctgggaggaacaataccagtgggatgtggaggacatgaaggtgtcaggtgttcactggggctatgaggagaccaagactttcctggcaattttgagtgaatctcctttctctgaaaagctccggacttgtcaccagaaccgccaggtatatcgggccattgcagagcagctaagggcaaggggcttcctgcggacactggagcaatgtcgctatagggtcaaaaacctcctacggaattaccggaaagccaagagcagccacccaccaggtacctgccccttctatgaggagctggaggccctggtcagggctcggacagccatcagagccacagatggcccaggagaggccgtggcacttcccaggctcggggatagtgacgcagagatggatgagcaggaggaagggggctgggatcctgaagaaatggcagaagactgtaacggtgctggcctggtcaatgttgagtctacccaggggcccaggattgcaggggccccagctctgttccagagtcgtattgcaggtgtgcactggggctatgaggagaccaaggccttcctggcaattctcagtgagtccccattctcggaaaagcttcgtacctgtcaccagaacagccaggtgtaccgggccattgcagagcggctgtgtgctctgggcttcctgcggacactggagcagtgtcgctacagattcaaaaacctccttcgaagctaccggaaagccaagagcagccacccaccagggacatgccctttctatgaggaactggactcgctgatgagggctcgggctgcagtcagggccatggggactgtccgagaggctgcaggtctccctaggtgtgggcagagtagtgctgagactgatgcccaggaggcctggggtgaagtggccaatgaagatgctgtcaaaccttcaaccttgtgtcctaaagccccagacatgggttttgaaatgaggcatgaggatgaagaccagatttcagagcaggacatttttgagggtttgcctggagccttatcaaaatgtcctacagaagctgtttgccaacctcttgactggggagaagacagtgaaaatgaaaatgaagatgaagggcagtggggaaatccctcacaggaacagtggcaagaaagttcttctgaagaggacttagaaaaacttattgaccatcaaggcctgtaccttgcggagaaaccctacaagtgtgacacatgcatgaagagcttcagtcggagctcccacttcattgcccatcagcgaatccacacaggtgagaagccctacaaacgccttgaatgtggaaaaaactttagtgaccgctctaacctcaatacccatcagagaatccacactggagagaagccctataaatgccttgaatgtgggaaaagctttagtgaccattctaatctcatcactcaccagagaattcacacgggggaaaagccctataaatgtggagaatgttggaaaagcttcaaccagagctcaaaccttctgaaacatcagagaatccacttgggaggaaatcctgaccagtgtagtgagcctgggggaaactttgcccaaagcccatcttttagtgctcactggaggaattctacagaagagacagctcctgaacaacctcaaagtatcagtaaggacttgaattctcctggaccacacagcacaaactcaggggagaaactttatgagtgttctgaatgtggaagaagcttctctaagagctctgccctcattagtcaccaaagaatccatacgggagagaaaccatatgaatgtgccgaatgtgggaaaagcttcagtaagagctccaccctggccaaccaccagcgcacccacactggagagaagccgtataaatgtgtggactgtgggaagtgcttcagtgagcgctccaagctcatcacacaccagagagtgcacacaggagagaagccctacaaatgccttgagtgtggaaaattcttccgtgaccgttctaacctcattactcaccagaggattcatacgggagagaagccgtataagtgcagagagtgtgggaaatgctttaaccagagctccagtcttattattcaccagagaatccacacaggggagaaaccctacaagtgcacagagtgtggcaaagacttcaacaacagttcccacttcagtgctcaccggagaacccatgcaggagggaaggcgtcgtaggggacagtttcctcaacaacaaaggaggactcaatgtatatatcttatatcataagatgtatgctagagagaaactttccaatttttaagcttggtgtgtacccagggaagttatcttggtataaaccaggtaatttggaagtgaattacaaatactaaggatccagatttgaaggc

SEQ ID NO: 4495 - DNA, 1492 bp, Homo sapiens
aaaacttcactccccagggctcccatccctggtgacaaagatcacagcagctggcactgcagatgcctttgtgggaggcaccatctgatcatcccgccaaccctcctgcaaccctgcaaggacacaccagcctcccagggtgccaggaggagcctgccagagacccccagagcggcctgccccaaatcacctctgagagcagcagcttttctgaaggaagcctcccctcatggtcctcaggcccagcaggtgccaagctcaatgccagccacgagggcattggctcatcgagtgatgggaacggggacagcaaggcggccacagagagggtggtctcagccatggacacagtacggcggaagcatcccgagatcacgttttatattctggtgaaggccatttataccctgggctacagtgtctctctgatgtctcttgcaacaggaagcataattctgtgcctcttcaggaagctgcactgcaccaggaattacatccacctgaacctgttcctgtccttcatcctgagagccatctcagtgctggtcaaggacgacgttctctactccagctctggcacgttgcactgccctgaccagccatcctcctgggtgggctgcaagctgagcctggtcttcctgcagtactgcatcatggccaacttcttctggctgctggtggaggggctctacctccacaccctcctggtggccatgctcccccctagaaggtgcttcctggcctacctcctgatcggatggggcctccccaccgtctgcatcggtgcatggactgcggccaggctctacttagaagacaccggttgctgggatacaaacgaccacagtgtgccctggtgggtcatacgaataccgattttaatttccatcatcgtcaattttgtccttttcattagtattatacgaattttgctgcagaagttaacatccccagatgtcggcggcaacgaccagtctcagtacaagaggctggccaagtccacgctcctgcttatcccgctgttcggcgtccactacatggtgtttgccgtgtttcccatcagcatctcctccaaataccagatactgtttgagctgtgcctcgggtcgttccagggcctggtggtggccgtcctctactgtttcctgaacagtgaggtgcagtgcgagctgaagcgaaaatggcgaagccggtgcccgaccccgtccgcgagccgggattacagggtctgcggttcctccttctcccgcaacggctcggagggcgccctgcagttccaccgcggctcccgcgcccagtccttcctgcaaacggagacctcggtcatctagccccacccctgcctgtcggacgcggcgggaggcccacggttcggggcttctgcggggctgagacgccggcttcctccttccagatgcccgagcaccgtgtcgggcaggtcagcgcggtcctgactccgtcaagctggttgtccactaaaccccatacctgg

SEQ ID NO: 4496 - DNA, 2519 bp, Homo sapiens
agactaactggcagagcagagggagaggagcttaggctataggctctgctcgggggtccaactgaagcaagaggcactgaggttagaccagagtgaggacttccagccactcacccgggggccagctgataagaggatcactcattaggaaaccaagaactcaagggattgggtcagcccagcaggagacaaaggcacagaggggaatggcccgaaggtgcctggggctggaagcagaggcagtggcggagccaagccggcccacctggctctctgtgagccccctgccccacactgcccagggcagcccccgcccggcccctaccctcctcacacttggttccccccagcccacagcacctgaggatgccctcttccaagccaggcagccctgcacctcaggacccctccccgtcgtgcagaacctgctcaaaccaggttcagccaggccacctcctgctgcccctcaccaaggccagcctgacgggcccatcgccccctcctgcaaagctaggtagggctcagggtgcccccagccccaagggacccttggaaataggctggagcccagatgctcagcctctgcgtcttggggagaccttcctcccaaagggagttgcccagctatcacgggccagcagttccggccacaaggtggggttcctgcagccctggcccccgcaccccctcctaccccaggagagagttccccgtcaccagaggcagtgctgtccgagagctggacccgccttcgggtgtctgagaggaaggcctggtggctggccggccacaggaagtggtgggcgtcagcagggtagaaagatggggcacccaccagtctctcccagtgccccggccccagctggcaccacagctatacctgggcttattccagaccttgtcgccgggaccccctggccccgctgggctctcattgccggcgcccttgccgcgggcgtcctcctcgtctcctgcctcctctgtgctgcctgctgctgctgccgccgccacaggaagaagcccagggacaaggagtccgtgggtctgggcagtgcccgcggcaccaccaccacccacctggtgcaacctgatgtggatggcctggagtccagcccgggggatgctcagcaatgggggcgcctgcagctctccctggagttcgactttggaagccaggaggtgaagggccccgctgcgcaggaccagcggttctgcgagtttccggaaagggtgacgggggaagggcagaccccatgccctgggtggtggggagctgacagggcaggggcccttggctgagcccaccccgctggctcccagatcagggtgggcctgaggcaggcagccgacctgaggcctgggggcaccgtggacccctatgcccgggtcagcgtctccacccaggccggacacagacatgagacaaaagtgcaccgaggcacgctctgccccgtgtttgacgagacctgctgcttccacgtgagtcagggatggtcggctgggtgggcctggacggctggatgggcctgggctgggtgggcctgggcagctgggtgggcctgggcagctgggtgggcctgagctagggcagcagggcctggctcacgccgctgcctcagatcccgcaggcggagctgccaggggccaccctgcaggtgcagcttttcaacttcaagcgcttctcggggcatgagcccctgggtgagctccgtctgccactgggcaccgtggatctgcagcatgttctggagcactggtacctgctgggcccgccggctgccactcaggtgaggtgctggtcaccaggccacagcccaaggcagagctggcagggaccctgccctatgggccatcggaaagacaggcctgatgggcagcattttcgggggtctgagccccaactcggccagaatcaccctcccgggctgaagcccctcttgctgcccacagcccgagcaggtcggggagctgtgcttctctctccggtacgtgcccagctcaggccggctgaccgtggtggtgctggaggctcgaggcctgcgtccaggacttgcagagccctacgtgaaggtccagctcatgctgaaccagaggaagtggaagaagagaaagacagccaccaaaaagggcatggcggccccctacttcaatgaggccttcaccttcctggtgcccttcagccaggtccagaatgtggacctggtgctggctgtctgggaccgcagcctgccgctccgaactgagcccgtaggcaaggtgcacctgggtgcccgggcctcggggcagcccctgcagcactgggcagacatgctggcccacgcccggcggcccattgcccagcggcaccccctgcggccagccagggaggtggaccgcatgctggccctgcagccccgccttcgcctgcgcctgcccttgccccactcctgaatgcaccacatgcctctgtctccccgctgagcccaggcacttgcccaggccgccctgcaggaccactgcaataaacgccttctcctgcc

SEQ ID NO: 4497 - DNA, 3059 bp, Homo sapiens
aactttgggtgtgagacgggattcaggctgtggctaatgtgctggaagcacgcacagttgtgaccatcaagtatgcaggaagcaatcattctcctggctctcctgggtgccatgtcaggcaatgtggcagagaattctccacctgggacttcagtgcacaagttttctgtgaagttatcagcatcattgtcacctgtgatcccaggatttccccagatagtcaactcaaatcccctcactgaagcttttagggtgaattggctgtcaggcacctactttgaggttgtcaccactgggatggaacaactagattttgaaacaggaccaaacatatttgatttgcagatttatgtgaaggatgaggttggtgtcacagaccttcaagtcctgactgtccaggtaacagatgtgaacgagccacctcagtttcaaggcaacttggcagaaggtctacacctctacatagtagaaagagcaaaccctggattcatttaccaggttgaggccttcgatccagaagacacaagccgaaacattcccctcagttatttcctgatttctcccccaaagagcttcagaatgtctgctaatggcaccctcttctccacaacagaattggactttgaagcaagacacagaagtttccatctcatcgtggaggtgagggacagtggaggcctcaaagcctccacagagctccaggtgaacatcgtgaacctcaacgacgaagtccctcgctttaccagcccgacacgagtgtacacagtcctggaggaactgagtccaggaaccatcgtggccaatatcacagcggaggatcctgatgatgaaggttttcccagccacctcctctacagcattaccactgttagcaaatatttcatgataaatcagttgactggtacaatccaagtggcccaaaggatagaccgagatgcaggtgaattgagacaaaatcccaccatttccctggaagttctagtgaaggacagaccatatgggggtcaggagaatcgcatccagataaccttcattgtggaagacgtcaacgacaatcctgccacatgccaaaagttcaccttcagcattatggtgccggaaagaacagccaaggggacgttgcttcttgacctaaacaagttctgctttgatgatgacagtgaggcaccaaacaacagattcaacttcaccatgccatctggagtggggagcggcagcagatttttacaggatccagctggctctgggaagattgtgctgattggtgatctagactacgaaaatccaagtaacctagcagccggcaataaatatacggtgataatccaggtgcaggatgtggcccccccttactataaaaataacgtctacgtttatatcctaacaagcccagaaaatgagtttcctctcatttttgataggccatcctatgtatttgatgtgtcagaaagaaggcccgccagaacccgagtgggacaggtgcgagccactgataaagacctcccccagagcagcctcctgtactccatctccactggaggggccagcctccagtatccaaatgtattttggattaatcccaagacaggagaactccagctggtaactaaagtggactgtgaaacaacccccatctatattctcagaatccaggccaccaacaacgaagacacaagctctgtcactgttactgtgaacatccttgaagaaaatgatgaaaagccaatttgtactccaaactcttatttcctggccctcccagtggatctgaaagttggcacaaatattcagaatttcaagctgacatgtaccgaccttgattccagccccagatctttccgttattccattggcccaggtaacgtcaacaatcatttcaccttctctcccaatgctggttccaatgtcacacgcccgctgcttacatctcgctttgactatgctggtgggtttgataagatctgggactacaagctacttgtctacgtaactgatgacaacttgatgtctgacaagaagaaagcggaggctcttgttgagacaggaacagtgacactgagtattaaagtcattccccacccaaccactatcatcaccacgacccccaggcccagggtcacctatcaggtcctgaggaaaaacgtttactctccatctgcatggtacgtgccgtttgtcatcactttgggctccatattgcttctgggtctcctcgtgtacctggtcgtcctattggccaaagccatccacagacactgcccctgcaagactgggaagaacaaggaacctctgacaaagaaaggagaaacgaagactgcagagagagacgtcgtggtggaaactatccagatgaacactatctttgatggagaagccatagatccagtgaccggggaaacatatgaactcaactcaaaaactggagccagaaagtggaaagatccactaacccaaatgccaaaatggaaagagtccagccaccagggagctgccccacgcagagtcactgctggggaagggatggggtcactgagaagtgccaactgggaagaagatgagctgagtggcaaagcgtgggctgaggatgctgatctgggttccagaaatgagggtggcaagctgggcaacccaaagaacagaaatccagccttcatgaacagggcttaccccaaaccacacccaggaaagtaaacggggtctaaggaggggcctgtcaatcactgagatgctgcctcaccctaaattctatggggatggtgtgggcatggtgtaggggggaaaatgtgggctgaggggattcagacatccagggtcaaacatgggatgtttgacaaatttttaaacaaatagaaaggggtttgatcacatagttgcgtgttctgaaatgatacaggaacattttctatcagatttcagaactacctgtgcttctgataagcaagactgttaactttggggtgtggaattgttgtgtttcttctttgcattgactgctaggaagctctattctgttcaccatagaaagtttgtaggaattcctgacataaatagtgaagact

SEQ ID NO: 4498 - DNA, 2324 bp, Homo sapiens
tccgcatggaggggccactcactccaccaccgctgcagggaggcggagccgccgctgttccggagcccggagcccggcaacacccgggacacgagacggcggcgcagcggtacagcgcccgactgctgcaggccggctacgagcccgagagcgacttcctgattctcccaggattcatagacttcatagctgatgaggtggacctgacctcagccctgacccggaagatcacgctgaagacgccactgatctcctcccccatggacactgtgacagaggctgacatggcctttgccatggctctgatgggaggtattggtttcattcaccacaactgcaccccagagttccaggccaacgaggtgcggaaggtcaagaagtttgaacagggcttcatcacggaccctgtggtgctgagcccctcgcacactgtgggcgatgtgctggaggccaagatgcggcatggcttctctggcatccccatcactgagacgggcaccatgggcagcaagctggtgggcatcgtcacctcccgagacatcgactttcttgctgagaaggaccacaccaccctcctcagtgaggtgatgacgccaaggattgaactggtggtggctccagcaggtgtgacgttgaaagaggcaaatgagatcctgcagcgtagcaagaaagggaagctgcctatcgtcaatgattgcgatgagctggtggccatcatcgcccgcaccgacctgaagaagaaccgagactaccctctggcctccaaggattcccagaagcagctgctctgtggggcagctgtgggcacccgtgaggatgacaaataccgtctggacctgctcacccaggcgggcgtcgacgtcatagtcttggactcgtcccaagggaattcggtgtatcagatcgccatggtgcattacatcaaacagaagtacccccacctccaggtgattggggggaacgtggtgacagcagcccaggccaagaacctgattgatgctggtgtggacgggctgcgcgtgggcatgggctgcggctccatctgcatcactcaggaagtgatggcctgtggtcggccccagggcactgctgtgtacaaggtggctgagtatgcccggcgctttggtgtgcccatcatagccgatggcggcatccagaccgtgggacacgtggtcaaggccctggcccttggagcctccacagtgatgatgggctccctgctggccgccactacggaggcccctggcgagtacttcttctcagacggggtgcggctcaagaagtaccggggcatgggctcactggatgccatggagaagagcagcagcagccagaaacgatacttcagcgagggggataaagtgaagatcgcgcagggtgtctcgggctccatccaggacaaaggatccattcagaagttcgtgccctacctcatagcaggcatccaacacggctgccaggatatcggggcccgcagcctgtctgtccttcggtccatgatgtactcaggagagctcaagtttgagaagcggaccatgtcggcccagattgagggtggtgtccatggcctgcactcttacgaaaagcggctgtactgaggacagcggtggaggccgaggtggtggaggggatgcaccccagtgtccacttttgggcacagcctccctccataactgagtggtccacagatttgcactacgggttctccagctcctttccaggcagagaggaggggaggtcctgaggggactgctgcccctcactcggcatcccctgcagagtcaggactgctcccggggccaggctgccctgggagcccccctctgagcccagccagccaggctctcaggccctgcgcctgcctcaggtctttcttgctgcagcctgctccagcctggcccccaccccaggggcaggcggcccctcctggcttctcctgtagggcacctccctgcccctagcctcccaggaaatggtgctctcctggccctgcctctggcccttcccgggccgctgcccctcagccatgtggcacttctgagctcctgacctaggccaaggggaggtctctgcccccttccccggccctgggctacccttgggtcctgctcctcaggccgctcccctgtccctggccatgggtaggagactgccctggtcatggccgcctgcctgtcattcctgactcaccaccgtccccaggtgaaccattcctcccttctcctcagctgcagtcgaaggctttaactttgcacacttgggatcacagttgcgtcattgtgtattaaatacttggaataaatcaagcaggtctcaacgcctcc

SEQ ID NO: 4499 - DNA, 2010 bp, Homo sapiens
catcactaagatactcctcaagaagagcaaccctaaaacacataatcgtcagattcaccaaggttgaaacgaaggaaaaaacgttaaggccagccatagagaaagatcacgttacccacaaagggaagcctatcagaataacagtggatctctcagcagaaaccctacaagccagaagagagtgggggtcagtattcagcattcttaaaacataattttcaacccagaatttcatatccagccaaactaagcttcataagcgagggagaaataaaatcctttacagacaagcaaatgctgagggattttgtcaccaccaggcctgccttacaagaggccctgaaggaagcactaaatatggaaaggaaaaaccggtaccagccactgcaaaaaccataccaaaatatgaagaccaatgaagctattaagaaactgcatcaactaatgtgcaaaataaccagatcaaattcacacataacaatattaaccttaagtgtaaattggctaaatgccccaattaaaaaacacagactggcaaattggataaagagtcaagacccatcagtgtgctgtattcaggagacccatctcatgtgcaaagacacacataggcccaaaataaagggatggaggaatatttaccaagcaaatggaaagccaaaaaaaaaaaaaagcgggggttgcaatcctagtctctgataaaacagactttaaaccaacaaagattaaaaaaagacagtggcattacataatgataaagggatcaatgcaatgagagctaactatcctaaatatatatggacccaatacaggagtacccagattcataaagcaagttcttagagacctgcaaagagacttagacttccacacaatcatagtgggagactttaacacaccactgtcaatattagatcaacgagacagaaaattggcaaggatattctgaacttgaacccagctctggaccaagcggacctaatagacatctacagaaccgtccaccccaaatcaacagaatatacattcttctcagcaccacataacacttattctaaaattgaccacataattggaagtaaaatactcctcagcatatgtaaaggaacggaaataataagtctctcagaccacagtgcagtcaaattagaactcaggattaagaaactcactcaaaactgcacaactacatggaaactgaacaacctgctcctgaatgactactgggtagataacaaaattaaggcagaaataaataagttctttgaaatcaatgagaacaaagacacaacgtaccagaatctctgggacacagctaaagcagtgttttgagggaaatttatagcactacatgcccagaggagaaagcaggaaagatctaatatcaacaccctagcatcacaattaaaagaactagagaagcaagagcaaacaaattcaaaagctagcagaagacaagaaataactaagatcagagcagaactgaaggagatagagacacaaaaaaaaccttcaaaaaatcaatgaatccaggagctggtttttttaaaagattaacaaaatagaccactagccagactaataaagaaggaaagagaagaatcaaatagatgcaataaaaagtgataaaggggatatcaccactgatcccacagtaatacaaactaccaccagagaatataaacacctctatgcaaataaactagaaaagctagaagaaatggataaattcctggatacatataccctcccaagactaaaccacaaagaagtcaactccttgaatagaccaataacaagttctgaaattgaggcagtaaataatagcctaccaaccaaaaaaagtccaggaccagacagattcacagccgaattctaccagaggtacaaagaggagctggtaccattccttctgaaactattccaaacaacagaagaagagcgactgctccctaactcattttatgaggccagtgtcatcctgatacccaaacctggcagagacacaac

SEQ ID NO: 4500 - DNA, 1996 bp, Homo sapiens
ctgtccccgcggctctgtgtcccctgctagccgtaggtcgtgtgacccgcaggcaccgggagatccagaagtgaaacgccaggctctctggaggccaggagatggcacagacaccttaccagaatgtctttggtttgaggttccactttggaaacttgacagggtgatttgctctcagccaccctctggactttttcctcagtttcagtattgtccagggataacacaggatgcccaccatggccatgtctgctggagcatctagtgaatttcaggccctgggttatttctcagaggacagcctgaggtatgaagtgtggcctctccagggagcagctggatgccctgggctgagagaaatctcctggtctactcttcctctaaagaggtgtgatttgtccagagaatctttcctaagaggaaatcccagagaagcaggagaaagagaaagaaatggctggtgctcagactctgttgacgttcagggatgtggccatagaattctccctggaggagtggaaatgcctggacctcgctcagcagaatttgtacagggatgtgatgttggagaactacagaaacttgttctccgttggtctcactgtctgtaagccaggcctgatcacctgcctggagcaacgaaaagagccctggaatgtgaagagacaggaggcagcagacggacatccagctatgtcttctcattttacccaagaccttctgccagagcagggcatacaagatgcattcccaaaaagaatactgagaggatatggaaattgtggccttgataatttatatttaaggaaagactgggaaagtttagatgagtgtaagttgcaaaaagattataatggacttaaccaatgttcatcaactacccatagcaaaatctttcaatataataaatatgttaaaatctttgataacttttcaaatttacatagacgtaatataagtaatactggagagaaacctttcaaatgtcaagaatgtggcaaatcctttcaaatgctctcattcctaactgaacatcagaaaattcacactggaaaaaaattccaaaaatgtggagaatgtggcaaaacctttatccagtgctcacactttactgaacctgagaacattgacactggagagaaaccttacaagtgtcaagaatgtaacaacgtcattaaaacttgctcagtccttactaaaaatagaatttatgccggaggggaacattacagatgtgaagaatttggcaaagtatttaaccagtgctcccaccttactgaacatgagcatggtactgaggaaaaacctttcaaatgtgaggaatgtgacagcatcttcaagtggttctcagaccttactaaacataagagaattcacactggtgagaaaccatacaaatgtgacgaatgtgggaaagcctatacacagtcctcacacctcagtgaacacaggaggattcacaccggagagaaaccctaccaatgtgaagaatgtgggaaggtcttcagaacttgctcaagcctttctaaccataagagaactcattctgaagaaaaaccctacacgtgtgaagaatgtggcaacatctttaagcagttatcagacctcactaagcataagaaaacccatactggagagaagccctacaaatgtgacgaatgtggaaaaaactttacccagtcctccaaccttattgtacataagagaattcatactggagagaaaccctacaagtgtgaagaatgtggcagagtcttcatgtggttctcagacattaccaaacataagaaaacccatactggagagaaaccctacaaatgtgacgaatgtggaaaaaactttacccagtcctcaaaccttattgtacataagagaattcatactggagagaaaccctacaagtgtgaaaagtgtggcaaagccttcacccagttctcacacctgactgtacatgaaagcattcatacttgagaaaaaaataaacaaatataaaaat

SEQ ID NO: 4501 - DNA, 1809 bp, Homo sapiens
cttttcccctcgctgttctgccctttgtcttccacgcctgccccttcaactcctcttgccctgcaaaccccgggtcgccacctccacatcccttccacttctacctgcctgccttggcctgcattttattttcaaccaaggttgaaatggtagccccacgcaaaatccgatggtgtgtggaggaactgcccagtcattgcagtctgcacgccttcttaagtgccagatgcgagcaaggccgaccaggaactgccgatgggcttcacctgtcagactggactgccacctgccacacattcattgaactttcaataagcactgccgctgtgcttggcgttttgctgggctccagaaataaaaaattcagagaggccaaagttcttcagggatgcagacaggtgatagaaccatcatttattgagcacttgctaagtgctaaatactcttacctgcgttatcttgtgtaatcctcacaaccacactcaacgacggcctattgaatgctctctaggtgtctggcagtgttccaaacagtttatgtgtattactttgtttgatcttcccaaccaccaatgagcggatattcaactcctttgtttacactgagaaaatctcaaatggagaaagtgaagtacagcagatactgacttgataaaaccagtttggctatgaaaattctggaagacaagctaagcaataaccatcctggacattggaacaggcaaagatttcacgacaaagacaccaagagcaatttcaacaaaagcaaaaattgacaaacgggatctaattgaaggtaagagcctctgcacagcgaaagaagctatcaacagagtaaataggcaacctacagaaagggagaaaatttttgcaaactatacatctgacaaaggtgtaacatctagcatctataaggaacttaaacaaatttacaagagaaaaacaaccccattaaaaagtgggcaaagaacgtgaacagacacttctcaaaagaagacatacatcttcccaacaagcatatgaagaaaagctcaatatcactgatcattagagaaatgcaaatcagaaccacaatgagataccatctcacaccagtcagaatggctatcatcaaaaaagccaaaaattaacagatgctggcgaggttgcagagaaaagggaacactaatacactgttggtgagagtgtaaattagttcaaccattgtggaaagcagtatggcgattcctcgaagagctaaaaatggaactatcatttgatccagcaatcccattattgggtatatacccagaggaatataagcattctactctaaagacacatgtgtgcgaatgttcattgccacactgttcacgatagcaaagacttggaatcaacctaaatgcccatcaatgacaaactggataaagaaattgtggtatatatatacactatggaatattatgcaaccataaaacaagatcatgtcttttgcaggaacatggatggagctgaaggctattacccttagcaaactaatgcagaaacagcaaaccaaatactgtatgttctcacttataagtaagtgggagctaaatgatgagaactcatgaacacaaagaaggaaacaacagacactggggtttacttgacaggagaggataggaggagggagaggagcagaaaagatgactactgggtactgagcttaatacctgggtgataaaataatatgtacaacaaacccccatgacatgtgtttctctatgaacaaaccttcacatgtacacccaaacctaaaattaaaaaaacaaaataaacaaacaaacc

SEQ ID NO: 4502 - DNA, 2410 bp, Homo sapiens
gtatctgctgccatcttctccgcgctatggctgcgttcggccgtcaggtaagctcgagctgggcgcgcgggcttctccgggtcgcaggcgggcgggcagcgacgcagaggaaccgcggccgccgagtgtttcacggccaggtcgtggagccctcccggaggtccgtgcacgctgacctggttttggcatcctggacccgtggctctgctcaattattgtgggatatagagttgacattttttttttttttttttgagacccccgtctcaaaaaacaaaaagaaaatcctaagagaaaatgtatttactattcattaagaggaagtagatcctcataaggtctttaggctgaagaggaggtgaaggagagtttggtcttggtgtctcaagggtggcagaggcggaagaaaatccacatataagtggatccaagcagttcaaacccttgttgttcaagggccaactctgtatcccacaagattcttctcgtggaatgaatttaagaacatgaatctggaaagtagtctgaggtccagacttttctggcacacatgaccaggtggcctagaaatagtttttccctcttcctccatgtccctgctcccatccttaaagctgcaaaagctaacaatattgtacctgcttgactcccatctctgtggccttgaaataccctgttctttgtgagcttccttctctgtaggcttaagttcagataggattttgcagattgcttataaaaattgtatgtttgtgtggaaccaaggcagtaagtactctggctcagaagtcttatggtgtccattacactggaatagtgaggaattaattgtcttttggtcctgtgtcttacaggtccttgattggcaccgcctgatccccctcacctgggcctgtatggctaggcagactcctcatcttggagaacagagaaggacgacagcttctttgttgcgcaaactgactacagcctccaatggaggggtcattgaggagttatcttgtgttagatccaataactatgtgcaggaaccagagtgcaggaggaatcttgttcagtgcctccttgagaagcaggggactcctgtggtacaagggtccttggagctagagagggtcatgagttccctcctggacatgggtttcagcaatgcccatattaatgaattgctcagtgtacggcgaggtgccagtcttcaacagttgctggacatcatttcagaatttattctcttgggtctgaatccagagcctgtgtgtgtggtcttgaagaaaagtccccagttattgaaactgcctattatgcaaatgaggaagcgctccagttacctgcaaaagcttgggcttggagaagggaaattaaagagggtgctttactgttgccctgaaattttcaccatgcgccagcaggacattaacgacactgtcaggcttctcaaggagaagtgccttttcacggtacagcaagtcaccaagatcttgcacagttgcccctctgttcttcgagaggacctgggtcaactggaatacaagtttcagtatgcatacttcaggatgggaattaagcatccagacattgtaaagagtgagtacttgcagtattcactaaccaagattaagcagagacacatttacctggagcgcctgggacggtaccaaacccctgataagaaggggcagacacagatccctaacccattgctcaaggacattctcagagtttcagaagctgagtttttggccaggacagcctgtacttctgttgaggagtttcaagtttttaagaagctcctggctcgggaggaggaggagtctgagagcagcacatctgatgacaaaagggcaagtctggatgaggatgaggatgacgatgatgaggaggacaatgatgaggatgacaatgatgaggatgacgatgatgaggacgacgacgaggcggaggacaatgatgaggatgaggacgacgacgaggaggaatagctgtgatggaaggactagagcgaaagggcccagagatatcaaggaagcttttcattctcttaaagcttttgggtcctttacttgaatcttctcaagttattttttattctaaaactggtctcttgatgaaaaaaattataagtcacctgagaggcagacagatcaaaccaaacaggaaacaggaaatgcatgtttgatctgttgtcacgtgtctgtggggagggccctgtcccatcctgaataagatacttatgttgagctattcacatcaaggggactcaatatatcaacaattggttttatttttttctcttttgaatatgttggtgataattccgtgacagttggaagatggggttcattcttccggttcaggaatcactatgtatttccttcttgtgataaaaataaaattacgagaaggcaatgtg

SEQ ID NO: 4503 - DNA, 1582 bp, Homo sapiens
gaaagccgctggcggaccgcgcgcagcggccagagaccgagccctaaggagagtgcggcgcttcccgaggcgtgcagctgggaactgcaactcatctgggttgtgcgcagaaggctggggcaagcgagtagagaagtggagctaatggcaatgcagatgcagcttgaagcaaatgcagatacttcagtggaagaagaaagctttggcccacaacccatttcacggttagagcagtgtggcataaatgccaacgatgtgaagaaattggaagaagctggattccatactgtggaggctgttgcctatgcgccaaagaaggagctaataaatattaagggaattagtgaagccaaagctgataaaattctgacggagtctcgctctgttgccaggctggagtgcaatagcgtgatcttggtctactgcaccctccgcctctcaggttcaagtgattctcctgcctcagcctcccgagtagttgggactacaggtggaattgagactggatctatcacagaaatgtttggagaattccgaactgggaagacccagatctgtcatacgctagctgtcacctgccagcttcccattgaccggggtggaggtgaaggaaaggccatgtacattgacactgagggtacctttaggccagaacggctgctggcagtggctgagaggtatggtctctctggcagtgatgtcctggataatgtagcatatgctcgagcgttcaacacagaccaccagacccagctcctttatcaagcatcagccatgatggtagaatctaggtatgcactgcttattgtagacagtgccaccgccctttacagaacagactactcgggtcgaggtgagctttcagccaggcagatgcacttggccaggtttctgcggatgcttctgcgactcgctgatgagtttggtgtagcagtggtaatcactaatcaggtggtagctcaagtggatggagcagcgatgtttgctgctgatcccaaaaaacctattggaggaaatatcatcgcccatgcatcaacaaccagattgtatctgaggaaaggaagaggggaaaccagaatctgcaaaatctacgactctccctgtcttcctgaagctgaagctatgttcgccattaatgcagatggagtgggagatgccaaagactgaatcattgggtttttcctctgttaaaaaccttaagtgctgcagcctaatgagagtgcactgctccctggggttctctacaggcctcttcctgttgtgactgccaggataaagcttccgggaaaacagctattatatcagcttttctgatggtataaacaggagacaggtcagtagtcacaaactgatctaaaatgtttattccttctgtagtgtattaatctctgtgtgttttctttggttttggaggaggggtatgaagtatctttgacatggtgccttaggaatgacttgggtttaacaagctgtctactggacaatcttatgtttccaagagaactaaagctggagagacctgacccttctctcacttctaaattaatggtaaaataaaatgcctcagctatgtagcaaaggg

SEQ ID NO: 4504 - DNA, 2615 bp, Homo sapiens
gaagatgaaattcagtaggcgagaagtgttggaaccaaaatcctcgttctggagtcattttatggaagcagctgctttggcttgaaatgagcccactcgtcaagtgaggagacatcgtcagtgctgcagccggggatcgccatggagaccagaggactggctgactccgggcagggctccttcaccggccaggggatcgccaggtttggaagaattcagaaaaaaagccaaccggagaaggtggtaagagcagccagccgtgggagacctttgattgggtggacacagtggtgtgctgaggatggtggtgatgagtctgaaatggctctggcagggtctcccgggtgctcgtctggaccccagggcaggctgtcgcgcctcatcttcttgctgcgcaggtgggctgccaggcatgtgcaccaccaggaccagggaccggactcttttcctgatcgtttccgtggagccgagcttaaggaggtgtccagccaagaaagcaatgcccaggcaaatgtgggcagccaggagccagcagacagagggagaagcgcctggcccctggccaaatgcaacactaacaccagcaacaacacggaggaggagaagaagacgaaaaagaaggatgcgatcgtggtggacccgtccagcaacctgtactaccgctggctgaccgccatcgccctgcctgtcttccataactggtatctgcttatttgcagggcctgtttcgatgagctgcagtccgagtacctgatgctgtggctggtcctggactactcggcagatgtcctgtatgtcttggatgtgcttgtacgagctcggacaggttttctcgagcaaggcttaatggtcagtgataccaacaggctgtggcagcattacaagacgaccacgcagttcaagctggatgtgttgtccctggtccccaccgacctggcttacttaaaggtgggcacaaactacccagaagtgaggttcaaccgcctactgaagttttcccggctctttgaattctttgaccgcacagagacaaggaccaactaccccaatatgttcaggattgggaacttggtcttgtacattctcatcatcatccactggaatgcctgcatctactttgccatttccaagttcattggttttgggacagactcctgggtctacccaaacatctcaatcccagagcatgggcgcctctccaggaagtacatttacagtctctactggtccaccttgacccttaccaccattggtgagaccccaccccccgtgaaagatgaggagtatctctttgtggtcgtagacttcttggtgggtgttctgatttttgccaccattgtgggcaatgtgggctccatgatctcgaatatgaatgcctcacgggcagagttccaggccaagattgattccatcaagcagtacatgcagttccgcaaggtcaccaaggacttggagacgcgggttatccggtggtttgactacctgtgggccaacaagaagacggtggatgagaaggaggtgctcaagagcctcccagacaagctgaaggctgagatcgccatcaacgtgcacctggacacgctgaagaaggttcgcatcttccaggactgtgaggcagggctgctggtggagctggtgctgaagctgcgacccactgtgttcagccctggggattatatctgcaagaagggagatattgggaaggagatgtacatcatcaacgagggcaagctggccgtggtggctgatgatggggtcacccagttcgtggtcctcagcgatggcagctacttcggggagatcagcattctgaacatcaaggggagcaagtcggggaaccgcaggacggccaacatccgcagcattggctactcagacctgttctgcctctcaaaggacgatctcatggaggccctcaccgagtaccccgaagccaagaaggccctggaggagaaaggacggcagatcctgatgaaagacaacctgatcgatgaggagctggccagggcgggcgcggaccccaaggaccttgaggagaaagtggagcagctggggtcctccctggacaccctgcagaccaggtttgcacgcctcctggctgagtacaacgccacccagatgaagatgaagcagcgtctcagccaactggaaagccaggtgaagggtggtggggacaagcccctggctgatggggaagttcccggggatgctacaaaaacagaggacaaacaacagtgaaaatgcagcatctgtctcctgcttcacagggtcgactgtcagggtgaccgtatgtggccgcagctgtgtggcatggaacttggtcagggttgaattccagctctactcaccctttgaaagctgtgtgactgcctgagagaacctgtttcttcacctaaaaaatgggactttttgtctcagtcccagtgaagtgccaggtttgattgtgaagtccgcatgaaacactgcaccaggcagggctttgcaaagtgcaaggtatccccagtccaagtatatgaaaacgtgcacacaggactctcattacttttttatggaatctgcaaggtgtttttaggctttttaatctgattttcttataaatgaaagattatttagtc

SEQ ID NO: 4505 - DNA, 1713 bp, Homo sapiens
aaatagatggattagctccagttcgctctagcagacaagatcagatccacagctctatagtatcaaccctccttgctcttatggatggattagataataggggtgaaattgttgttattggtgctacaaacagacttgactctatagatcctgcactcaggagacctggtcgttttgacagagaattcctcttcaacctgcctgatcaaaaggcaagaaaacacatcttacagatccataccagggactggaatccaaaattgtcagatgcatttttaggtgaattggctgaaaaatgtgttggctactgtggagccgatatcaaggccctgtgcactgaagccgccctgattgcactgcggaggcgttatccccagatctatgctagcagtcataaactgcagctggatgtttcctcaatagtgcttagtgcccaagatttttaccatgcaatgcagaatatcgtgcctgcttcccaacgtgctgtgatgtcttcagggcatgcactatcccccatcataagaccactgctggaaagaagcttcaacaacatcctagcagtcttgcaaaaagtgtttcctcatgctgaaattagccagagtgacaaaaaagaagatatagaaactttaattttagaggatagtgaagatgaaaatgctttatcaatttttgagaccaattgtcactcaggatcaccaaagaaacagtcatcatctgctgctatacataaaccctaccttcattttacaatgtcaccatatcatcagccaacctcttacaggccacgcttattgctctctggagaacggggctcaggtcaaacttctcaccttgctccagcacttttgcacactctagaaagattctctgtgcatagactagatctcccagcactttattcagttagtgccaaaacacctgaggaatcatgtgcacagatttttcgtgaagctcgaagaacagtacctagtattgtttacatgcctcacattggggattggtgggaagctgtcagtgaaactgtgagagcaacttttctgacattgctacaagatataccatcattttcacctatatttttattgtctacctctgaaaccatgtacagtgaactgcctgaagaggttaaatgtatctttagaatacagtatgaagaggtcttgtatattcaaaggcctattgaagaagacagaagaaaattttttcaagaattgattctcaatcaggcatcaatggctccaccacgaaggaaacatgctgctctttgtgctatggaagtgcttcctcttgcactaccttctccacctcgtcaattatcagaatcagaaaaaagtcgaatggaggaccaggaggaaaatactttaagagagttgcggttgtttctcagggatgtaaccaagaggctggccacagataaacgctttaacatcttcagcaaaccggtggatattgaagaggtttcagattatcttgaagtaatcaaggaaccaatggacttatcaacagtaataactaaaattgataaacataattacctgactgcaaaggatttcctgaaagatattgacctcatctgtagcaatgctttagagtataatccagataaggacccaggagataaaataattaggcacagggcttgtaccctgaaggacactgcacatgctatcattgcagctgaattagatccagaatttaataaactttgtgagg

SEQ ID NO: 4506 - DNA, 2505 bp, Homo sapiens
tttagcacaaatcaaaagccatcatattttctagaaatgagagaccccaggaaagtggacctcagggccctcagaattcttctgcttggctcccttgagtggccagcttgggtgggaggccactccagtgggtttcattctgcagcatgctggagagcttccacttccaaacccaagttcacacatgcttctgtatccttcctgccaccttgctcctctgagtatggtctccggttgtccaaggcactgcctgtcctgggagtcacctgtatgtgaggcacccttggtgccttgagatatcatgtagaagccttggttcttctcagacaactccattcatgcaaactctccccctcctcctagcctgggtcccaggctttgtttttttttgggtccataatgtctgcctgtgtggacagcagcttgggccctggtgcagaacagctcctaggtcccttcttcaggctcctacccctgcccctgctcctacccccaggtgaattaggagccctgaggaggagcctggctgcagcgaggcccacagactgagagtagctgagctccttctgtccctagccttggacagctggggcatgtagagccacagagcagagtcaggccctgccctgctcacagcccaaggagagagcagacatggaaacaggtgctttgaacccagcacagcgatgattagagtagggggaaggattgagaagggtcaggccagccccacctggtgcacacactgagagcgtggtcccagaggagggatgttgtttgagcaggctctgaaggaccatgaggagtcttcctgatagacagcagagaagggagcaggggttacaagcaaagggagtgtttcttctgaatactgtttgtgtgatagctccactgcagcatggaggggtcaaagtgtatgtgcggggcggaggggagatggcagggttggagtggcagccgggagaatagtcacactttcccaagctccctccccagctcaccctacccctactctgcttagcccttctgaacttctgagaggtgcaacagagtttgggggtgggtgggaatttcctagccagaagtgggaagctggggctgcctgcacataggggtattccagcacaccctagggcaagctcatattgagttggcaccatctggatgcctgggcttcccctgctagatggtggggcaggggtgctccttagaaccacgactggatctgaggcctcttggtaaccccagaagcaagcagagtagacatcagtcatgggtgtgggagaggcaggagggagagaggaatggaggaagcaaagaagggaaggagggagggaggggaggctctaaaaccgtcatccctattccaatatctgatcttgaattggcctcaacacctgtgcatccctgcaggggtggacccagtccccagttgcttcccagggagtacgggggtggggtggggattctctggctttcctccctgcccctcctctgcaggctgatgctgggcttcatgggcgtcacagccctcctgtccatgtggatcagtaacacggcaaccacggccatgatggtgcccatcgtggaggccatattgcagcagatggaagccacaagcgcagccaccgaggccggcctggagctggtggacaagggcaaggccaaggagctgccagggagtcaagtgatttttgaaggccccactctggggcagcaggaagaccaagagcggaagaggttgtgtaaggccatgaccctgtgcatctgctacgcggccagcatcgggggcaccgccaccctgaccgggacgggacccaacgtggtgctcctgggccagatgaacgagttgtttcctgacagcaaggacctcgtgaactttgcttcctggtttgcatttgcctttcccaacatgctggtgatgctgctgttcgcctggctgtggctccagtttgtttacatgagattcaattttaaaaagtcctggggctgcgggctagagagcaagaaaaacgagaaggctgccctcaaggtgctgcaggaggagtaccggaagctggggcccttgtccttcgcggagatcaacgtgctgatctgcttcttcctgctggtcatcctgtggttctcccgagaccccggcttcatgcccggctggctgactgttgcctgggtggagggtgagacaaagtaagtcttggattcaatagaaatcgctggcttagggccaggcgcgttggctcacacgtgtaatcccagcactttgggaggctgaggtgggtgggtcacttgaggtcaggagatcgagaccatcctggccaacatggtgaaaccctgtctctgctggaaatgcggaaagttagcgaggcatggtggcacatgcctgtggtcccagctacttgggagactgaggcaggagaatcacttgaacccaggaggcagaggttgcagtgagcccagatcgtgccactgcactccagcctgggcaacagagagagactccgtctc

SEQ ID NO: 4507 - DNA, 2216 bp, Homo sapiens
acttgcctgaaaccggctcctcgacggccgccgcccgcctggccttttagggcctgactcccgcccttcctggcctacactcctgggcggcggcaggcctagcttctggcccagtgcgggttccccggcggcaggcgtatcctgtgtgcccctgggccaggcccgaacccggtgtccccgggtggggggtggggacgccacggccgaagcagctagctccgttcgtgatccgggagcctggtgccagcgagacctggaatttccggtctggttggtctggggccccgcggagccaggttgataccctcacctcccaaccccaggccctcggatgcccagaacctgtaggccgcaccgtggacttgttcttaatcgagggggtgctggggggaccctgatgtggcaccaaatgaaatgaacaaagctccacagtccacaggccccccacccgccccatcccccggactcccacagccagcgtttcccccggggcagacagcgccggtggtgttcagtacgccacaagcgacacaaatgaacacgccttctcagccccgccagcacttctaccctagccgggcccagcccccgagcagtgcagcctcccgagtgcagagtgcagcccctgcccgccctggcccagctgccctacccccagtgagccccctgaaggcggctctctctgaggaggagttagagaagaaatccaaggctatcattgaggaatatctccatctcaatgacatgaaagaggcagtccagtgcgtgcaggagctggcctcaccctccttgctcttcatctttgtacggcatggtgtcgagtctacgctggagcgcagtgccattgctcgtgagcatatggggcagctgctgcaccagctgctctgtgctgggcatctgtctactgctcagtactaccaagggttgtatgaaatcttggaattggctgaggacatggaaattgacatcccccatgtgtggctctacctagcggaactggtaacacccattctgcaggaaggtggggtgcccatgggggagctgttcagggagattacaaagcctctgagaccgttgggcaaagctgcttccctgttgctggagatcctgggcctcctgtgcaaaagcatgggtcctaaaaaggtggggacgctgtggcgagaagccgggcttagctggaaggaatttctacctgaaggccaggacattggtgcattcgtcgctgaacagaaggtggagtataccctgggagaggagtcggaagcccctggccagagggcactcccctccgaggagctgaacaggcagctggagaagctgctgaaggagggcagcagtaaccagcgggtgttcgactggatagaggccaacctgagtgagcagcagatagtatccaacacgttagttcgagccctcatgacggctgtctgctattctgcaattatttttgagactcccctccgagtggacgttgcagtgctgaaagcgcgagcgaagctgctgcagaaatacctgtgtgacgagcagaaggagctacaggcgctctacgccctccaggcccttgtagtgaccttagaacagcctcccaacctgctgcggatgttctttgacgcactgtatgacgaggacgtggtgaaggaggatgccttctacagttgggagagtagcaaggaccccgctgagcagcagggcaagggtgtggcccttaaatctgtcacagccttcttcaagtggctccgtgaagcagaggaggagtctgaccacaactgagggctggtggggccggggacctggagccccatggacacacagatggcccggctagccgcctggactgcaggggggcggcagcagcggcggtggcagtgggtgcctgtagtgtgatgtgtctgaactaataaagtggctgaagaggcaggatggcttggggctgcctgggcccccctccaggatgccgccaggtgtccctctcctccccctggggcacagagatatattatatataaagtcttgaaatttggtgtgtcttggggtggggaggggcaccaacgcctgcccctggggtccttttttttattttctgaaaatcactctcgggactgccgtcctcgctgctgggggcatatgccccagcccctgtaccacccctgctgttgcctgggcagggggaaggaggggcacggtgcctgtaattattaaacatgaattcaattaag

SEQ ID NO: 4508 - DNA, 3103 bp, Homo sapiens
agaaggccacgcgagcccgggagggacgcggcggcgggggctgcaggaaaggcgcgagcagaggcggcggcgggtgtactgtaggtggtcggtccggcagcagcccggcccccggacgcaggacgtggccccaggcagccctcgcagctcagtgctctagccggggcaagcccgcgtctccgcctgctggacgggcccaggcgagatgtagggctctgggcgcggaggccgccggtggggcggctgatcgcggaggatcgcggagggcgcgccgaggatggagagagcgatggagcaactcaaccgcctgacgcgctcgctgcgccgcgcgcgcaccgtggagttgcccgaggataatgaaactgctgtttatacattaatgccaatggttatggctgatcaacacaggtctgtttctgaactactatcaaattcaaaatttgatgtcaattatgcattcggacgtgtgaaaagaagcttgcttcacattgcagcaaattgtggatcggtggaatgcttggttttgctgttaaagaaaggagcaaatcctaactatcaagatatttcaggctgtacaccccttcatttggcagcaagaaatgggcagaagaaatgtatgagtaaattattagaatatagcgctgatgtcaacatttgtaataatgaaggccctacagcaatacattggctggctgtgaatgggcggacagaactactccatgaccttgtgcagcatgtcagtgatgttgatgttgaggatgccatggggcagacagcactgcatgttgcctgccagaacggtcacaagacgacagtgcagtgcttgctagacagtggtgctgatattaacaggccaaatgtatcaggagcaactccattgtactttgcttgcagtcatggtcagagagatacagcacagatcctactattacgaggagccaaatatctgccagataaaaatggagtaactcctctggatttatgtgtacagggtggatatggagagacttgtgaagtattaattcaatatcacccgaggctttttcagactattattcaaatgacacagaatgaagacctccgagaaaacatgttacggcaagttctggagcatttgtctcagcaaagtgaaagccagtacctaaagattctaacaagccttgctgaagtttctacaacaaatggtcataaactgcttagcctctctagcaattatgatgctcaaatgaagagccttttaaggattgtgagaatgttttgtcacgtctttcgaattggtccatcctcccccagtaatggaattgatatgggctacaatgggaataaaactccaagaagccaggtgttcaagcctctggaattgctttggcactcgttagatgaatggctagttttaatagccacagaattgatgaaaaacaaaagagactcaacagagatcacttctattttactgaaacaaaaaggccaagatcaagatgctgcttccattcctccatttgaacctccaggacctgggagctatgaaaatctgtccactggcacaagggaatctaaaccagatgctcttgcagggagacaggaagccagtgcagattgtcaggatgttatttctatgacagctaaccggctaagtgctgtcattcaagctttttacatgtgctgttcttgtcagatgcctccgggaatgacttcacctcgtttcattgaatttgtctgcaaacatgatgaagttttaaaatgctttgttaatagaaatcccaaaattatatttgaccactttcactttctccttgaatgtcctgagttgatgtcaagattcatgcatatcataaaagcacaggcggagtacgtccagcttgttactgaacttcgaatgacaagagccattcagcctcagatcaatgcttttttacagggcttccatatgttcattccaccctccctcatacagctttttgatgaatatgaattggagctactgctttctggcatgccagaaattgatgtgagtgattggataaaaaatacagaatacacaagtggctatgaaagagaagatccagttattcagtggttctgggaagttgtagaagacattactcaagaggagagagttcttctcttacagtttgttacgggcagttccagggtcccacatggtgggtttgctaatatcatgggtggaagtggattgcaaaactttacaatcgctgctgtgccatatactccaaatcttttaccaacttcaagcacatgcatcaacatgctcaagttacctgaatacccaagtaaagaaatactcaaggacagacttcttgtggcactacattgtggcagctatggttacacaatggcataatgaagtctggaaaactcctctgactactgatgcacaattcagaatggcagaagtaatttgggaaaatgtcaacaaaaaaagcagcctaaatgcaacccataggcagggctgatgcttccaatttataaaggatcatcaggttttctgtttctctcttttcccttttatgttttctctgtttgtgatacaattagaaaatataaaatcacagtagattttattttttaaaatgctaactgaaagtaatagagactgtcctttttcataattaattttatccaagattgtattaaggcaaaatctgattctacattccacctctgctatgtaactgtcttgttaaaagggtgttttctcctaatttctgatatattatatgaggtcatccagctggtgtgttcttttgcatgtaaactgccatttatattttagaaaactattgtatagaatggatttagattgtctataaagccacaaatacgtattttgccacagtgtattctatattgcaatgatttttttagcattttaatattttaatatatattgtaaaatttagactgatgatactaacagttgatgaaatgacatataatttatatatgaaagcttacgctatattgtatgaattatttgcatctttcagtggccagttttccatatgtatatattatggtctcaatgtttttcttacgcctcattttaatttataatgaaggtaaaattaaaatgtattttacc

SEQ ID NO: 4509 - DNA, 3613 bp, Homo sapiens
atttttttaaacagggctaaaacgataataattagcagaataaagacatatcggattttcatttcctttcctccttttcccaaccccttcacaaccaaacagcgagaccgcggtcggcacatgctttaactcctcccggacccccgaggaccgctccatgccccccactttctgctccagcgtttttattttcacccaataaagttcgaggattattttttattttttttgtttttttaatgaaccctctcgttttacttggatgtgatcagctgtaagtaaaataaaagcaaaacaaaaaagaggcgaagatcgagtaggaactgcaggggaaatggaaagtccctgacaggctggatgaaatgagatccccatgtagcaattgccatggaaacctgtgactcccctcctatctcaaggcaggaaaatgggcagagcacatcaaagctatgtggaacgacacaacttgataatgaggtgctagagaaagttgcagggatggagcctgacagggaaaacagctccacagatgacaacctgaaaacggatgagcgcaaaagtgaagccttgctgggtttcagcgttgagaatgcagctgccactcaggttacctcagcaaaggagataccctgcaacgaatgtgccacttcttttcccagtttacagaaatacatggaacaccactgccctaatgcccgccttcctgtcctgaaggatgacaacgagagcgagatcagcgagttagaggacagtgacgtggaaaatctaacaggggagatcgtttaccagcctgatgggtcagcatatataattgaggactccaaagaaagtgggcagaatgcacagactggggcaaatagcaaactcttttctacagcgatgttcctggactccctggcatctgctggagagaagagtgatcagtctgcttctgcacctatgtcgttctacccacagatcatcaacacttttcatatcgcttcatccctcgggaaaccatttacagccgatcaggctttcccaaatacctcagcattagcaggagttggtcctgtgttgcacagtttccgtgtctatgatctccgacacaagagagagaaagactatctaaccagtgatggctcagccaaaaactcctgtgtgtccaaagatgtccctaacaatgtggacttgtccaaattcgatggttgtgttagcgatgggaaaaggaaacctgttttaatgtgtttcttgtgcaagttgtcttttggttatatcaggtcatttgtaacccatgctgtgcatgatcatcggatgaccctcaatgacgaggagcagaagctcctcagtaataaatgcgtctccgccataatacaggggattggcaaagacaaagaacctcttataagctttctggaaccaaaaaaaatccacttctgtttatccccatttttctactacaaacctcataggacccgatccaaccttccgcggtttatggagcgcttttcatgttgaaaatggtgactctttgccggctggctttgccttcttaaaaggaagcgcgagcacctcgagctcagcagagcagccgctggggattacccaaatgccaaaggctgaagcgaatctgggggggctgtctagtttagtagtgaacaccccaattacctctgtctccctcagccactcatcgtctgagtctagcaagatgtcagagagcaaagaccaagagaacaactgtgaaaggccaaaagaaagcaacgttttacacccaaacggggagtgccctgtcaaaagtgaacccactgaaccgggagatgaggatgaagaagatgcgtactccaatgaacttgatgacgaggaagtattaggtgaactcaccgatagtattggtaacaaagatttccctctcttaaaccaaagcatttctcctttatcatccagtgtgctaaaatttattgaaaagggtacctcgtcctcctcggcgactgtttctgatgacacagaaaagaaaaaacagactgctgctgttagggccagtggcagtgttgctagtaactatggcatcagtggcaaggactttgcagacgcaagtgccagtaaagacagtgccacagctgctcatccaagtgaaatagcccggggagacgaagacagttcagccactcctcaccagcatggctttaccccgagtactcctggcacaccagggcctggaggagacggctcaccgggcagtggcatcgagtgtccaaagtgcgacactgtgttggggtcttcgaggtctcttggtggtcatatgactatgatgcactcgaggaactcatgcaaaaccctcaaatgtcctaaatgtaactggcactacaaatatcagcagaccctggaggcccatatgaaggagaaacaccctgagccgggtggctcttgtgtttattgtaagactggacagcctcaccccaggcttgcccggggtgagagttacacgtgtggctataaacccttccgttgtgaggtttgtaactactctaccactaccaaaggcaacctcagtattcatatgcagtcggacaagcacctgaacaatgttcagaatctccaaaatggcaatggtgagcaggtgtttggccactctgccccagcccccaacaccagcctcagtggctgcggaacaccctctccgtccaaacccaaacagaaacccacctggcggtgtgaagtttgtgattatgaaaccaatgtcgccaggaacctccgaattcatatgaccagcgaaaagcacatgcataatatgatgcttttgcagcagaacatgaagcagatccagcataatctgcacttgggcctcgccccggcggaagcagagctttatcagtactacctagcccagaacataggcctgaccggaatgaagctggaaaaccctgccgaccctcagctgatgatcaatccattccagctggatccagcgacagcagcggctttggcaccagggctcggagagctgtcaccttatatcagtgacccagcgctgaagctattccagtgtgctgtttgcaacaaattcacctctgacagcctggaggccctaagtgtgcatgtgagcagtgagcgctctctccctgaagaggaatggagggcagtaattggagatatctaccagtgcaagctctgcaactacaacactcagctcaaagccaacttccagctacactgcgagactgataaacatatgcagaaatatcaactggtggctcacattaaagaagggggcaaaagcaatgagtggaggttgaagtgtattgccattggcaaccctgttcacctaaaatgtaacgcctgtgactattacaccaacagtgtggataaattacgcttgcataccaccaatcacaggcacgaggcggccctgaagctctacaaggtaagcagtgacatccatttccgttggcacagagtagaaaagggaattaactctttcagagcttggagcacaagtctccaacttaaggaaaaaaaaagagaaaaaacatcaaagggcagggggcacagtttctgattaacattataaaaacatattgaaatatatggaattgaaggctttatttataaagttttaccctatgtctcactt

SEQ ID NO: 4510 - DNA, 3620 bp, Homo sapiens
acacccggaagcagatcgcgctggggaaaggccacgtcgctatgagtgtgtttcagtctacctggattaaacgtttgcttctcttcgtctaccttgattaaacgtgcacttcgcagtcctcggttctccatacccgtgacctggggatcgctacggaccttaaaatacccgcaacagccccttcgtcccaagctggagagcagtggcatgatctcggctcactgcagcttctacttcctggcctcaagcagtctttccacctcagcctctcaacgcactggaattacagatgtgagccaccacactaggcctacaagtggtccttacaccagattaatttatcttgaaatggcgggcaactgaatcgcacacctcaatctatgatttgacttttaaagaattaattatattgactgagagagaggcccaggagagaaagaagaaagaaaaggagccagggatggctcttcctcaggtatctctcctaaatgtgtgatcaaggaattaccaccaatacagaacagtaacacaggagaaaaattccaagcagtgatgttggaaggacatgaaagctatgacactgaaaatttttacttcagggaaatccggaaaaatctacaggaagttgactttcaatggaaagatggtgaaataaattataaagaagggccgatgacccataaaaacaatcttactggtcaaagagttcgacatagtcaaggggacgtagaaaacaagcatatggaaaatcagcttatattaaggtttcagtccggtctgggtgaattgcagaaatttcaaactgcagagaaaatttatggatgtaatcaaattgagaggacagttaataattgttttttagcttcaccacttcaaagaatttttcctggtgtccaaaccaacatttctaggaaatatgggaatgattttttgcaactttcgttacctacacaagacgagaaaacacatattagggaaaaaccttacataggtaatgagtgtggcaaagccttcagagtgtcttcaagtcttattaatcatcagatgatacatactacagagaaaccttacagatgcaatgagtctggtaaagcctttcatcggggctcactactaacagtacatcagatagtccatacaagagggaaaccataccaatgtgatgtatgtggcaggatcttcagacaaaattcagatcttgtaaatcaccggagaagtcacactggagacaaaccctacatatgtaatgaatgtggcaagtcctttagtaaaagttcccaccttgcagttcatcagagaattcatactggagagaaaccttacaaatgtaatcgatgtgggaagtgctttagtcaaagttcctctcttgcaactcatcagacagttcatactggagacaaaccctacaaatgtaatgaatgtggcaaaacctttaaacggaactcaagcctcactgcacatcatataatccatgcaggaaagaaaccatatacatgtgatgtatgtggcaaggtcttttatcagaattcacaacttgtaaggcaccagataattcatactggagagacaccttacaaatgtaatgaatgtggcaaggtcttctttcaacgttcacgtcttgcagggcaccggagaattcatactggagagaaaccctacaaatgtaatgaatgtggcaaggtcttcagtcaacattcacatcttgcagtgcatcagagagttcatactggagagaaaccttacaaatgtaatgaatgtggcaaagcctttaattggggctcattactaactgtacatcagagaattcataccggagagaaaccttacaaatgtaatgtgtgtggcaaggtctttaattacggtggatacctttcggttcatatgagatgtcatactggagagaaacctctccattgtaataaatgtggcatggtcttcacttactattcatgcctagcacgtcatcaaagaatgcataccggagagaaaccttacaaatgtaatgtgtgtggcaaggtcttcattgacagtggaaacctttcaattcataggcgaagtcataccggagagaaacctttccagtgtaacgaatgcggcaaggtcttcagttactactcatgcctagcacgtcatcggaaaattcataccggagagaaaccttataaatgtaatgattgtggcaaagcctatactcagcgttcaagcctcactaaacatctggtaattcatactggagagaacccttaccactgtaatgaatttggtgaggcttttatccaaagttcaaaacttgcaagatatcacagaaatcctactggggagaaaccacacaaatgtagtgaatgtggtagaacttttagtcataaaacaagtctggtgtaccatcagagaagacatactggagagatgccatacaaatgtattgaatgtgggaaagtctttaactccactacaaccctggcaaggcatcggagaattcatactggagagaaaccttacaaatgtaatgaatgtggcaaggtcttccgttatcgctcaggcctcgcacgtcattggagtattcatactggagagaaaccttacaaatgtaatgagtgtggcaaagcctttagagtacgttcaattctgcttaatcatcagatgatgcatactggagagaaaccttataaatgtaatgaatgtggtaaagcttttatcgaaaggtcaaacttggtttaccatcagagaaaccatactggagagaagccatacaaatgtatggaatgtggcaaggcgtttgggcggcggtcttgcctcactaaacaccaacgaattcattctagtgaaaaaccttataaatgtaatgagtgtggcaaatcttacattagtcgctcaggcctcactaaacatcagataaaacatgctggagagaaccttacaactaaactcaatgtggaaaggccgttagatgttgtcctaacctctgggatccccaaataatttatacttactcatatagcttgtatatttgtcctttccctttgaagtctcatgtggaattgtagtaatctccagtattggaggtggagcctagtgggaggtgattggatgatgggggtggctttctcaagaaagttttagtaccatccccttgttgctgtccttgtgatagttctcatgaggtctggctcatgcctgtaatcccagcactttgggaggctgaggtgggcggatcacttgaggtcaggagttcaagagcagcctggccaacatggtgaaaccctgtttctgccaaaaatacaaaaattagctgggcttcgtggcgggtactggtagtaccagctactcgagaggctgagtcaggagaattgcttgaaccctggaggcggaggttgcagtgagccgagatcgcgccactgcactctagcctgggtgacagagtgagactccatcacgcacacgcacgcacgaaagtgaatggcacctccctcttgtttgttcttctggccatgtgacatgcccttcacctcccaccatcattttaaccttcctcaggtttcccgagagggtgaacagacgtcagcgccatgtttcctataaagcctgcaaaattgtgagtcaattaaacctctttatacatt

SEQ ID NO: 4511 - DNA, 2349 bp, Homo sapiens
agtccggaattgcatgtggtgggtgcttacttatttgcagtctcaatcaagaattctcactctcaagatagcagaaatagataagcttcaactgacaaatttggtacagaagtcatggaaaggaagtgtgctgagagctggtggccagtgggactgagtgagctgtgtgccgtgtattgacccgcttcctagtcctgaattcctttcagaagctccagcagggaggatgatacagtcaggcaaaggagcagatccaccagacaagaaggacatgaagctttctacagccaccaatccacagaatggcctctcccagatcctgaggcttgtgctgcaagagctgagtctgttctacagcagagatgtgaatggagtgtgtctcttgtacgatctcctccactcgccgtggcttcaggctctgctaaagatttatgactgcctccaggaatttaaagaaaagaaactagttcctgccacaccacatgcacaggtgttatcctatgaggtagtggagttattacgtgaaacccctacttcccctgagatccaagagctgagacaaatgctccaggctccacacttcaagggagccaccatcaagcgccacgagatgacaggggacatcttggtggccaggatcatccacggtgggctggcggagagaagtgggttgctatatgctggagacaaactggtagaagtgaatggagtttcagttgagggactggaccctgaacaagtgatccatattctggccatgtctcgaggcacaatcatgttcaaggtggttccagtctctgaccctcctgtgaatagccagcagatggtgtacgtccgtgccatgactgagtactggccccaggaggatcccgacatcccctgcatggacgctggattgcctttccagaagggggacatcctccagattgtggaccagaatgatgccctctggtggcaggcccgaaaaatctcagaccctgctacctgcgctgggcttgtcccttctaaccaccttctgaagagatggagtttcgctcttgttgcccaggctggagtgcaatggcactatctcgactcactgcaacctctgcctcccgggttcaaacgattctcctgcctcagcctcccacgtagctgggattatatagaagatgacatgaagattgatgagaaatgtgtggaagcagatgaagaaacatttgaatctgacaaggaggagtttgttggctacggtcagaagttctttatagctggcttccgccgcagcatgcgcctttgtcgcaggaagtctcacctcagcccgctgcatgccagtgtgtgctgcaccggcagctgctacagtgcagtgggtgccccttacgaggaggtggtgaggtaccagcgacgcccttcagacaagtaccgcctcatagtgctcatgggaccctctggtgttggagtaaatgagctcagaagacaacttattgaatttaatcccagccattttcaaagtgctgtgccacacactactcgtactaaaaagagttacgaaatgaatgggcgtgagtatcactatgtgtccaaggaaacatttgaaaacctcatatatagtcacaggatgctggagtatggtgagtacaaaggccacctgtatggcactagtgtggatgctgttcaaacagtccttgtcgaaggaaagatctgtgtcatggacctagagcctcaggatattcaaggggttcgaacccatgaactgaagccctatgtcatatttataaagccatcgaatatgaggtgtatgaaacaatctcggaaaaatgccaaggttattactgactactatgtggacatgaagttcaaggatgaagacctacaagagatggaaaatttagcccaaagaatggaaactcagtttggccaattttttgatcatgtgattgtgaatgacagcttgcacgatgcatgtgcccagttgttgtctgccatacagaaggctcaggaggagcctcagtgggtaccagcaacatggatttcctcagatactgagtctcaatgagacttcttgtttaatgctggagttttaacactgtacccttgatacagcgatccatagttgcaatctaaaacaacagtatctgacccattttaatgtgtacaactttaaaagtgcagcagtttattaattaatcttatttgaaaaaaatttttattgtatggttatgtggttacctattttaacttaatttttttttcctttacctcatatgcagctgtggtagaaatatgaataatgttaagtcactgagtatgagaacctttcgcagatttcacatgatctttttaagatttaaataaagagctttcctaaat

SEQ ID NO: 4512 - DNA, 2261 bp, Homo sapiens
atagttacgcaggcgcagtggggagaaacgcgacgccttgggccgctctgccgaatgcaaccgcgcccccaggagacccggtgcccgccctcctaccattccgcgcggctcgagcccgcgtgcgggcctctttcaggccgctcctagtggacgcagaggcgggccgaggacggtcacaggcgcgagatggagtccccaagagggtggaccctgcaggtggccccagaggaaggccaggtcctctgcaatgtgaagactgccacgaggggcctctctgagggggctgtgtctggaggctggggggcctgggaaaactccacggaggttccgagggaggcaggggacggccagcggcagcaagccacactgggggcggcggacgaacagggaggccccggcagggagctgggccccgcagacggtgggcgggacggggctgggcccaggagcgagcctgcagaccgggcgttgcgcccttcgcctctcccagaggagccgggctgccggtgcggggagtgcggcaaggcgttcagccagggctcttacttgctgcagcatcggcgtgtgcacacaggcgagaagccgtacacgtgccccgagtgcggcaaggccttcgcctggagctccaacctcagccagcaccagcgcatccacagcggcgagaagccctacgcttgcagggagtgcggcaaggccttccgcgcgcaatcgcagctcatccaccaccaggagacacacagcggcctgaagcccttccgctgcccggactgcggcaagtccttcggccgaagcaccacgctggtgcagcaccgacgcacgcacacgggcgagaagccctacgagtgcccggagtgcggcaaggccttcagctggaactccaatttcctggagcaccggcgcgtgcacacgggcgcgcggccgcacgcctgccgggactgtggcaaggccttcagccagagctccaacctggccgagcacctgaagatccacgcgggcgcacggccacacgcctgtcccgactgcggcaaggccttcgtgcgtgtggcggggctgcggcagcaccggcgcacgcacagcagcgagaagcccttcccctgcgccgagtgcggaaaggctttccgcgagagctcgcagctcctgcagcaccagcgcacgcacactggtgagcggcccttcgagtgcgccgagtgcggccaggctttcgtcatgggctcctacctggcggagcaccggcgcgtgcacacgggcgagaagcctcatgcgtgcgcccagtgcggcaaggccttcagccagcgctccaacctactgagccaccggcgcacgcactcgggcgccaagcccttcgcctgcgccgactgcggcaaggccttccgcggcagttccggcctggcgcaccaccggctttcgcacacgggagagcgacccttcgcctgcgcagaatgcggcaaggccttccgcggcagctccgagctgcgccagcaccagcgcctgcactctggcgagaggccgttcgtctgcgcccactgcagcaaggccttcgtgcgcaagtcggagctcttaagccaccggcgcacgcacacgggcgagaggccctacgcttgcggcgagtgcgggaagcctttcagccaccgttgcaacctcaacgagcaccagaagcggcacgggggccgcgctgcgccctgacccgaggacgccctgagcgggaggtcgcggacacacggcattgcggggtctcgggcgtgagtgcgctgtctgctggcccagactttttcgggccgccggtgcgggcgccctcctgctgggagtgcaggggcggccttgggtgtggagaaccctggctgcacagtccctttgacgatagtccaccggccacccaggcctgtctggggacatgtaggatgggctcttaccccagggagggcggcaggctccacttcggcgagaggttcgtccatgcagaggtgggcaagaactggggtctccgacaggtgtggctatttctttgagttctctggcactgtcaaaagcagccaacccaccccccagtccacatggtcaccactgctgctaccagctgctcagtgcagtggccactgtgtctcctaaggtgctcgcttcagtcagcacttcatctcaggcaaccacaggtgacagttaaacatgatgaaaccgcatgctatggctttctagtgtctcatattctgttggcaagaagctcagcactgcattcctgaccgaggtcagaaccagatcaatctcag

SEQ ID NO: 4513 - DNA, 2986 bp, Homo sapiens
aaacactccgggccgcccgccccgccaccagctggctccgaccggcgcaccgctggcgatcccccaggcaattcggcgtcatgagaaccggcaccccgagactcggcgccctgccctccctccgcgtctccagggccctggccaggcccaacaacctctccctcctctgtgcgcctcagcccctacgggcctctggcgcgggctaactaggcctcgctgcgggcccccaggactgcgcaccccaccccccgcgaggccagcagccccgggggaaggcggccggaaaatctcttgtttatcgggctggataagtaccagcctggattcgcttcccaatttctgcggtccagcttcagcagattcctggggccggaggggaaagggtggcaacccacagatccaccccggaacagggagtggggggtggggctggtgggaacctgacctcctggaaaggacggactcggagtcagagccaacgtgtcccggagcgcagaggcccagggggtcgcgctaaacactgtacctcggggaacaaaaccgtgaaggctaattaggacaagtcggagcagggaacggggacgccgggaggggagagcgcgctccgagctgggcagaacctggaacggtcacaggaaacccgggcgcggggtagtcgggccgagggggacctttgcccacggtccagagtggtctggactcggcccacgcgtgagaggagcgcttggtgacgatcccacgtacgcttggtgactggtggaggtcccagagaaggaccgtgcgtgcaaaaggcgaacctcggtgtgcggcgtgtccacgtgtgcaagctggggaggggagggggcgcagaaggcgtgacaaagacggactctgtcttgagtgtgcgcctcgctccggcccgctcccagcgaactgcgcctgaagtgtgtctcacgggagggccaggacgaaggtgacaaaggctaggtgtcccccacggagacgcgccaaggtagccccgcgcgtgtccgtaggcgcgctctctggaagacgcggtggggggtgcgcagggctgcaccctcacaccaattgccccggcgaaggccgagcccagaaagtgagtgcgcgtgagtgtgcgcgcgcccgcatgcgggggcgtggcagtcaacagcaacaacccacacgccggcagggccagaaactcccatctccctcaccagccggaaagtacgagtcggctcagcctggagggacccaaccagagcctggcctgggagccaggatggccatccacaaagccttggtgatgtgcctgggactgcctctcttcctgttcccaggggcctgggcccagggccatgtcccacccggctgcagccaaggcctcaaccccctgtactacaacctgtgtgaccgctctggggcgtggggcatcgtcctggaggccgtggctggggcgggcattgtcaccacgtttgtgctcaccatcatcctggtggccagcctcccctttgtgcaggacaccaagaaacggagcctgctggggacccaggtattcttccttctggggaccctgggcctcttctgcctcgtgtttgcctgtgtggtgaagcccgacttctccacctgtgcctctcggcgcttcctctttggggttctgttcgccatctgcttctcttgtctggcggctcacgtctttgccctcaacttcctggcccggaagaaccacgggccccggggctgggtgatcttcactgtggctctgctgctgaccctggtagaggtcatcatcaatacagagtggctgatcatcaccctggttcggggcagtggcgagggcggccctcagggcaacagcagcgcaggctgggccgtggcctccccctgtgccatcgccaacatggactttgtcatggcactcatctacgtcatgctgctgctgctgggtgccttcctgggggcctggcccgccctgtgtggccgctacaagcgctggcgtaagcatggggtctttgtgctcctcaccacagccacctccgttgccatatgggtggtgtggatcgtcatgtatacttacggcaacaagcagcacaacagtcccacctgggatgaccccacgctggccatcgccctcgccgccaatgcctgggccttcgtcctcttctacgtcatccccgaggtctcccaggtgaccaagtccagcccagagcaaagctaccagggggacatgtaccccacccggggcgtgggctatgagaccatcctgaaagagcagaagggtcagagcatgttcgtggagaacaaggccttttccatggatgagccggttgcagctaagaggccggtgtcaccatacagcgggtacaatgggcagctgctgaccagtgtgtaccagcccactgagatggccctgatgcacaaagttccgtccgaaggagcttacgacatcatcctcccacgggccaccgccaacagccaggtgatgggcagtgccaactcgaccctgcgggctgaagacatgtactcggcccagagccaccaggcggccacaccgccgaaagacggcaagaactctcaggtctttagaaacccctacgtgtgggactgagtcagcggtggcgaggagaggcggtcggatttggggagggccctgaggacctggccccgggcaagggactctccaggctcctcctccccctggcaggcccagcaacatgtgccccagatgtggaagggcctccctctctgccagtgtttgggtgggtgtcatgggtgtccccgcccactcctcagtgtttgtggagtcgaggagccaaccccagcctcctgccaggatcacctcggcggtcacactccagccaaatagtgttctcggggtggtggctgggcagcgcctatgtttctctggagattcctgcaacctcaagagacttcccaggcgttcaggcctggatcttgctcctctgtgaggaacaagggtgcctaataaatacatttctgctttatt

SEQ ID NO: 4514 - DNA, 2533 bp, Homo sapiens
aactctcctttccccgccctctttcccctcggcgcttcgctcctcacggacctcaggacggctctaactcggaaacagtccccaaacgggcccagatcctctggcggagcagaagagggccttgatgtacacacgtcggtactcaagcataagcagtactataatggatgtagacagcacaatttccagtgggcgttcaactccagcaatgatgaatggacaaggaagcactacttcttcaagcaaaaatattgcctataattgttgttgggaccagtgccaggcttgcttcaactctagcccagatctggcagatcacatccgttccatacatgtagatggtcagcgaggaggggtatttgtttgcttatggaaaggttgtaaagtatataacactccatctaccagtcaaagttggttacaaaggcatatgctgacacacagtggagacaaacctttcaagtgtgttgttggtggctgcaatgccagctttgcttctcagggagggctagctcgtcatgtacccacacacttcagtcagcagaactcctcaaaagtttctagccagccaaaggccaaagaagaatctccttctaaagctggaatgaacaaaaggaggaaattaaagaacaaaagacgacgctcattaccacggccacatgatttcttcgatgcacaaacactggatgcgataagacatcgagccatatgctttaacctctcagctcatatagaaagtttagggaagggacacagtgttgtttttcatagtactgtaatagctaagagaaaagaagattctgggaagatcaaacttttgcttcattggatgcctgaagacattctgcctgatgtgtgggtgaatgaaagtgaacgacatcagttaaaaactaaagtagttcatttatcaaagctacccaaagatactgccttgcttttggacccaaacatatacagaacaatgccgcagaagaggttgaagagaactctgataagaaaagtgttcaatttgtatttaagcaaacagtgaacgacgtttgcaatcaactaaaaattcgtctatcgaattagggctgaaaattactgttaaagagtgttgcagtatgtctggtggctcccttttcaggactagggctttctcatggagtacagtatgttaatatttacctatataactaatctgttaacggtttttgaaaaacctttcaaattatttgaataatcttcatattttcatttaacctatatgactctaattttttttctgaggaaatcatttggtttttgagttgttttttcttaatgtaagaaaaattgtattttttttacaagtatcttcaaactgaatcttttatgcaccaaagttggtcttgaaaaggaaaataaaatcactttcttgcttggtaagcaagaagccatatcgattttttttaacttacagaaatggaaatatgtgtaacttgttagtattgtattaaacaaatgttgcatagagataatagaacattgcttgtaaataattcagcagatttgtaatatatttttatattttgaaatgtactgtagatgttttctagaggcatgaaagttaaatgtatatattatggtagaaataatattgaaggatattgtacttcactagtgctgccagaggaattgttaataaaagcaccttctttaacaataaatgtctttcacagacttaagggactatgtactactgttaatatctctaagaacaaaacacattgaacatccttccagaaagtctttgagggaggacctatacccataatagaattatggcactcatttctgacagtgatcaagaaatcagttatttccttactgttggaaggacattgtaaagtatgtggttatatgcagtgaaactgcagaaaatactcctggttgaggagttttcactttactacagtgatataaaaaccagcagtttttacactaaattttttaaagaaatattagacaaaaatatagaattaaaacctttggttccaaaatgggaaaggttccacgatacataaatcatttcgcatttgctttaaaaaatttaaaagtgtaaaaattatgagagactttattcgttaacaatgggggtaaagagctatatacatgaaaatgagtcttataaaattaagtgaagtgcaaataaaagcactgctactataagacattctggaatggttgtttaataagggtattatccatttgatctatagcaatgtgattttatttttaaaaagaaaagcagtgtgttttctttttttgttgttttcttttgcttaagcacttcatcaattgctttattctgtatctgcgaagtaatctgcaatctcttttgttctttttaaaatttgatttgttataaaattgccaaatagaagtgtttcagatacatagtttgtacctgtatttttattttattgcctcatgttcttgtaagtcattcttaattgaccaatgattgtagaccttgcttgagtattttttctaataaaacaaagcaaatcac

SEQ ID NO: 4515 - DNA, 2678 bp, Homo sapiens
atactgctgggattacaggcgcccgccaccacgcccggctaattttttgtatttttagtagagacggggtttcactgtgttggcaaggatggtctctatctcctgacctcgtgatatgcccgcctccgcctcccaaagtgctgggattacaggcttgagccaccgcgtctggcctatttatttattattttcgagacggagtgttgctcttgtggcccaggctggagtgcaacggcgggatttcggctcactgcaacctctgcctcccgggttcaagcaattctcctgcctcagcctcctgagtagctgggattacaggcaggcgccaccacacccggctagttttgtatttttggtagaaacggggtttctccatgttggtcagtctggtttcgagctcccagcgtcaggtcatctgcctgcctcggcctcccaaagtgctgggattacaggcgtgagccaccgcgcccagccacttctgtatttttaaaaaagtggtaaggaagtggaggattaaatgatttgcccaaagtctcacagtaatttgtagagctgagattgaaattcgggtgaaacttcacatatcacattctttttatcagatggcagtttctggatttactcttggtacctgcatacttctgttgcacattagttatgtggctaattatcccaatggaaaagtaacacagtcatgccatggaatgattcctgaacatggtcatagtccacagtctgttcctgttcatgacatttacgtgagtcagatgacattcaggccaggagatcagattgaagttactttgtcagggcatccatttaaaggctttctcctagaagcgcgtaatgctgaggatctgaatggccctcctattggctccttcacattgattgacagtgaagtgtcacaacttttgacctgtgaagatatacagggatcagcagtgagtcacagaagtgcatctaaaaaaacagaaattaaagtctactggaatgctccaagcagtgctccaaatcacacacagtttctagtcacagttgttgagaagtataaaatctactgggtgaagattcctggtcctataatttcacaaccaaatgcatttccttttacaacacctaaagctacagtagtacttttgccaacgttacctcccgtttcccacttaaccaaaccattcagtgcctcagattgtgggaacaagaagttctgtattaggagtcctttgaactgtgacccagagaaggaggcttcctgtgtcttcttgtccttcacaagagatgaccaatcggtgatggttgaaatgagcggccccagtaaaggctatttatcctttgcattgtctcatgatcagtggatgggtgatgatgatgcttatctgtgtattcatgaagatcagactgtgtacatccagccttcccatttaacggggcgaagtcaccctgtaatggactccagggatacccttgaggatatggcttggaggttggcggacggtgttatgcagtgttctttcagaagaaacattacccttcctggagttaagaatagatttgatctaaacacaagctattacatatttctagcagatggtgcagctaatgatggtcgaatttacaagcactctcagcaacctttgattacctatgaaaaatatgatgtgacagactctccaaagaacataggaggatcccattctgtactccttctgaaggttcatggtgccttaatgtttgtggcatggatgactactgttagcataggtgtactggttgcccggttcttcaagccagtttggtcaaaagctttcttgcttggtgaagcagcttggtttcaggtgcatcggatgctcatgttcaccacaactgtcctcacctgcattgcttttgttatgccgtttatatacaggggaggctggagtaggcatgcaggttaccacccatacctcggctgtatagtgatgactttggcagttcttcagcctcttctggcagtcttcaggccacctttacatgacccaagaaggcaaatgtttaactggactcattggagtatgggaacagctgctagaataatagcagtggcagcgatgttcctgggaatggatttaccaggactgaatcttcctgattcatggaaaacctatgcaatgaccggattcgtagcctggcatgttgggactgaggttgttctggagttgaaatattggatgatgacagaattcagatccttcagtcatttactgcagtggaaacagagggtcatgcttttaaaaaggcagtgttggcaatttatgtctgtgggaatgttacttttctcatcatatttttatctgcaatcaaccatctatgagcaagcaaagaccttggcttttgcaggccaagtgataattatcatcaaaccaaagaaacttgaagcctgtcctgactgcctggagcatatttgtgaattctcacttggaagactggggtcatgtctgtagaggaattctgaagtccagcctttagagaacaacattcaagagggtcatatagactataaattaatgtcatgccctatatgtaattctgggtcttaaaggaaagattgtacttcaggagaagtaactctcaaatatttcatgccaagattttaagaatgttggtatttaagaaaataaatagtgatttggaaaatc

SEQ ID NO: 4516 - DNA, 3176 bp, Homo sapiens
agctattaagtgacataatgattagaagattaaagactgaagttttaacccagctaccccctaaagtcagacagcgtattccatttgatcttccatcagcagctgccaaggaattgaataccagctttgaagagtgggaaaaaataatgagaactccaaattcaggtgccatggagacagtcatggggttgataactcgcatgtttaaacaaactgctattgccaaggcaggtgctgtaaaggattatattaagatgatgcttcagaatgattcgcttaaatttctggtttttgctcaccatttaagcatgctccaagcttgcacagaagcagtcatcgaaaataagactcgttacattaggatagatggaagtgtttcatcttcagaaagaatacatctggttaatcagtttcaaaaggatcctgacactcgcgtggctatcctaagcattcaggctgctggccagggattaacatttactgcagcaagtcatgttgtatttgctgagttgtactgggaccctggacatataaaacaagcagaagaccgagctcacagaattggccagtgcagttctgtgaatattcactaccttattgcaaatggaaccctagacacccttatgtggggaatgttgaatcgcaaggctcaagttacagggagcacactgaacggtaggaaagaaaaaattcaggctgaggaaggtgataaggaaaaatgggatttcctgcagtttgctgaagcttggactccaaatgacagttctgaagagttaaggaaggaagctttgttcactcacttcgaaaaagaaaaacagcatgatattcgatcatttttcgtaccacaacctaaaaaaagacagttgatgacctcctgtgacgaatcaaagagattccgggaggaaaatactgtagtgtcatcagaccctacaaaaacagctgcaagagatatcatcgattatgaaagtgatgttgaacctgaaacgaaaagattgaaattggctgcctcggaagaccactgcagtccgtcggaagagacaccatcccagtccaagcaaatccgaactccactcgtggaaagtgtacaggaggccaaggcccagttaaccaccccagcctttcctgtagagggctggcaatgtagtctctgcacctatatcaataattcagagttaccttattgtgaaatgtgtgagactcctcaaggcagtgctgttatgcaaatagatagcctcaaccatatccaggataaaaacgagaaggatgattctcagaaagacacctccaaaaaggttcaaactatctcagactgtgaaaaacaagcccttgcacagtcagaacctggccagttggctgacagcaaggaagaaacaccaaaaattgagaaagaagacggacttacatcccagccaggtaatgaacagtggaagagttcagacactttgccagtgtatgacaccttaatgttctgtgcaagtaggaatactgaccggattcacatctatactaaggatggaaaacagatgagctgtaatttcattcctctggatataaaattagacctttgggaagatttaccagcaagctttcaactgaaacaatatcgctcactgattttgagatttgttcgagaatggagtagtctaactgccatgaagcaaaggataatcaggaaaagtggacagctattctgtagcccaattcttgctttggaagagatcacaaagcaacaaaccaaacaaaattgcaccaaaagatacataaccaaagaagatgttgccgtagcctcaatggacaaagcgaagaatgttgggggccatgtccgtctgatcacaaaggagtccaggccacgggatcctttcacaaaaaaacttcttgaagatggagcctgtgtcccatttctaaatccatacacagtccaggcagatctcactgtgaagccctctacatccaaaggctatttgcaagctgtggataatgaaggaaatccactttgccttcgctgtcagcaacccacttgccagactaagcaagcatgtaaagcgaactcttgggattcacggttttgctctctgaaatgtcaggaagagttttggattcgatctaataacagttacctgagagccaaagtatttgaaactgaacatggtgtgtgtcagctctgtaatgtgaacgcacaagaactctttttacgtctgagagatgcccctaaaagtcagaggaagaatcttctgtatgctacctggacttcaaagctcccattagaacagctaaatgaaatgataagaaacccaggggaaggacatttctggcaggtggatcacatcaagccagtgtatgggggaggaggacagtgttccctggacaacctgcagactctctgcacagtctgtcacaaagaaagaactgccagacaagctaaggaaagaagccaggtgagaagacaatctctagcatcaaagcatggatcagacatcacacgatttttggtaaagaagtaaagtagaaaaatatatgaatgaatgacaaatggtttacatgtggaagactttaatacagaagttttccatgtttgtttaatatatcgagagtaaaaattttcagaacaaaaatcaagaattcaaattctcttctactaattacttttagtattaaatacattttgaaagtacttaacagaaactaagatacaatactgaatatttctgtggtctttttgatttgattcagactcgcaattatgtttcagcaatgttttgtaaagctctttacccctaatatgcctaatcactgtattgtgcatagattgtgtttaaaaaatgtactctcaattacctaaaaatgcttctggattagtattgttctggactgtcataggtatgagtggaacattgcaaaaccttatgggaaatttcagacgcaaatcattatttgggaattctgggccaagcatgaccagcctgcttaggattcaagagagactgtccactaaatacctccagaatgagctaggggcacacattttgggtgttgcttttcttgctttatttcttagctagtcatctttatcaaaaatatccttttcaaaatgaggtacctatggtgtttgtggacaatttgggggttctgtgtaaagtaattgttaaaactattaaataactgaaaacataaaatgt

SEQ ID NO: 4517 - DNA, 4796 bp, Homo sapiens
aagaaagaggaagggctgcggccgcggaaggctggggtcggtgaccggccggttatctctggctcggtggtgacttagggtctgggtctccgcagacgatttgtgtttgggcaaggcattcgtctaccgacacacccacagcctacagtgagggagtgtgggtgaggggatttctctcccacttccgactctccctagagtctcaggatgggggctgaggaccgaggcgtgggagtgcgatttgacaatggagtgatgaaggctttccttaaagtttcccatgtctcaatggactcctgaatataaggagctctacaccttaaaagtggatatgaagagtgagattccttctgatgcaccaaagacacaggagagtctgaaagggatccttttgcatccagagcccattggggcagccaaaagttttcctgcaggagttgagatgattaatagtaaagtggggaatgaattctctcacctgtgtgatgattctcaaaagcaagagaaggaaatgaatggtaaccagcaagaacaagaaaaaagtctcgttgtgaggaaaaaacgcaaaagccagcaggctggcccttcgtatgtgcagaattgtgttaaagaaaaccagggaatattaggactgaggcaacacctagggacaccaagtgatgaagataatgattcctcttttagtgattgtctttcttctccttcatctagtctgcattttggagattctgatactgtgacttcagatgaggataaagaagtctctgtaagacattcccagaccattttgaatgctaaaagtagaagccatagtgcacggtctcataagtggcctcggactgagacagaatctgtatcgggattgttaatgaaaagaccctgtttacatggcagttcgttacggagacttccatgcagaaagagatttgtaaaaaataattcctcacagaggacacagaaacaaaaagagaggatattaatgcagaggaagaaacgagaagtgttagctcgaagaaaatatgccttgctacctagttctagtagttccagtgagaatgacctcagcagtgaatcctcttctagctcatcaactgaaggagaagaagatttgtttgtttctgccagtgaaaaccaccaaaacaatccagctgttccctcaggaagtattgatgaagatgttgtggtgatagaagcttcctccactccccaggttactgccaatgaagaaattaatgttacctcaactgacagtgaagtggagattgtaacagttggagaaagctatcggtctcgttcaacccttggacactccagatctcattggagccagggttccagttctcatgcaagtcggccacaggagccacggaaccgcagtaggatttctactgttatacagcccttgaggcagaatgcagcagaagttgtggaccttaccgttgatgaagatgaacctactgtagtaccaaccacttctgcaagaatggaatcacaagctactagcgcttccattaacaattcaaatccatctacctctgagcaggcctctgatactgcttcagctgtcaccagtagccaaccttccacagtgtcagagacttcagctactcttacaagcaatagtaccactggcacttctataggagatgactcaaggagaactacatctagtgctgtaacggaaactggccctcctgcaatgccaaggttaccttcctgctgtccccagcactcaccatgtggagggtcgtcacagaaccaccatgcattaggacatcctcatacaagttgctttcagcagcatggtcaccattttcaacatcatcaccaccaccaccatactccccacccagctgtcccagtttctccttcctttagtgatcctgcttgccctgtggaaagacctccacaagtacaagcaccttgtggagcaaatagtagttctggtaccagctatcatgaacagcaggcattgccagtggacctgagcaacagtggtatcagaagtcatggaagtggcagttttcatggagcatctgcatttgacccctgctgccctgtttcttcctcccgagctgcaatctttggccatcaggccgctgctgctgccccaagtcaacctttatcatcaatagatggctatggatcaagcatggttgcgcagccccagccccagccccctccacagccctctctctcatcatgtcgacattacatgccacccccttatgcctctttgacaaggccacttcatcatcaagcttctgcctgcccgcattctcatggaaacccccctcctcagactcagcctccgcctcaagtggattatgttattcctcatcctgtacatgctttccattctcaaatatcttctcatgcaacatctcatcctgtggcacccccaccaccaactcacttagccagtacagctgcaccaatccctcagcatcttcctcctacacaccagccaatttcgcaccatattccagccacagcacctccagcacagagactgcatcctcatgaagtgatgcagaggatggaagttcaaaggaggaggatgatgcagcatccaacgcgggcacatgaacgccccccaccccatccacataggatgcacccaaactatggtcatgggcatcatattcatgtgcctcagactatgtcctcacatcctcgacaggctccagagaggtctgcctgggaactgggaattgaagctggagtgactgcagctacttatacacctggtgcattgcatcctcacttggcccattatcacgcacctcctcgacttcatcacttacaattaggagctcttcctttaatggttcctgatatggcaggctatcctcacatccgttacatttcatcaggattggatggaacatcattcagaggtcctttcaggggcaattttgaggaactgattcatttggaagaaagattaggcaatgtcaatcgtggagcatcccaggggacaattgaaagatgtacatatccacataaatacaaaaaggtaacaactgattggttctcacagaggaaactgcactgcaaacaagatggggaagaagggactgaggaagacacagaggaaaaatgtactatctgtttgtctattttagaggaaggtgaagatgtgagacgtcttccatgtatgcaccttttccaccaagtgtgtgttgaccaatggttggttaccaataagaagtgccccatatgcagagtggacattgaggcccagctgccaagtgaaagttgacaccatgtttcagaactcttgccctccctctcattcccatccttcctggtactgcagtcaaccaaagatggcatgacttacctgcgcagatttgggagcattgaacttagagtgctggctctgctatatggtacaactaatgctagacctacagtttatgtatacagttgattttgatgtatttataaaagcttttttttctagatttgacatttttctgtatcattttactgtatttttgcatggttccttgtattgcatttctttgcacatattatgggcttgtgaccctaaacttgcaggcaaggttagctgctttagtaagtagaattttgtggtctttttgttttttacatagtaccaagccttgataattatgaattttttatccattactaacctttaatttaatcaatcatgtactttagtttaatgtataaagatcctctagaaaatgataatattgtgtattaagacattccttaattaggacaaaatggctgctgtatatttactatatggagttctgagttaaataccgtccttaatactgggaacagaatacaacccatataaatcagatgcaggtggtagtcacatcaccagagtgatcagtataaattttcttggtgtatccttttcctttcaacacagtgcagataagagttgaatattgatatcatacatttagactgctgttctgattgcatttatctttttcctacatcatttagaattttatttccctgattcagtttttgctgctgtgaaacagctctgatgaacactaaatattaatttcaattagctagattgtacatacttgcagatttaacaaaattttagggaaattgaaaaagacatgtagaatttgttgtcttctgctaagcacgaaaagttaagatatctgcttacattgattttgtagacacattaagtcaagatttggaatttaagtcactggcaggtatctgtgcattcatagaacttataaaggtcccaggatcacttttaagggatttttattagtttaaaggtaaataaagtcagctgaatctacatgtctcttgttttatttctctctaaacttgaaaacagtaaatctgcagatactgtgaggcacaaattatactgtcaacctactgttgctatggttatatactcccacttcatacattaccaagagtcgatcactgatttaaaatttttaatttctatagttaagatttactgcataacatagaatataaagttaagttaacatactaacatttctcctttggaggaagttttaatctacttcaggatgcatattattatcaagatactttcatatacaggatagcctaattttatttgtttaaatatgcttaatatgccccagattgcaaatgcatccagtcagtaatatcactgtctgtatgtggaggacatgttcccatggatcatatgtgaagatgtcaataagcttgcattaagccacctgctttgtaagtggattgattaataaataacttatatttctattgtc

SEQ ID NO: 4518 - DNA, 3975 bp, Homo sapiens
acagttcccttttgcctccagagttatttttccttttgctctcctctttatttattttcttcccccattctcccttttctgtcctttccgccctcccaagctgtcaacaacagctcccctagactctgcctagcacagaattttgctgacttctgagaaattcaagaggcaaacctgcagggcaaagaaactctacatggtgaattggtacctgaccttctttcataagagggaaaactggggcatggaacttgtcagtgaagctcagcatgctacaagagcatcttggtttgtcctagttgaggactggaaaatctcaatctctagtcaacaaatgagtgttcctacccagggatggcctgcttctgaagaggcacagtgatttggcatagcccgcaagagcaagcatcagcctgggaagaggactgatcccacacccacccacccacccactcatttattcagtgctctacatatcgccaagtgccttctatgtgtcaggcaaggctgagacctggctcccactcatggctgctaggtggtgaaaactcagcttcttcgccccgtagaatggtcaggaagagccccgtgcagccccattgagaaggggcaggatgaaggagctgcttcctcataatgacattgtccaagaatgaccatgctcttcaatgatgctccatccagcccggcattgtgcagctatgtggatgttattattctatcttgtgaaaggacacggtgaatgctggaatcagtgaatcatccgaagaaatgagaggtggagtggctgggcgggtggagccaccgagctagagatgtcctttgtcctcacaggcagctttggccgtagtactgggtttgaagggaagtggaagtgacacgtaccacctctaggccatggccttacgacacagggcacttgctcctctatcctctcatctcccttcctgtgggctgtgatggatgggcagtgtgacccagacttcgtcatgcctgtgaggctaacactggggatgccaggacctgagatggagaacctgggtccccaaagagtgtgtgaagtggaacctgccgccagtctagactgctcacccctgctgtgtgtgaggcaaacacacttctgtcttatttaagccactgacctcttgggccactgttacagcaacttagcctttgccctactaatataaaggggtgaaagagcagctctctcttccttttctgagtttagaaccaattaagagaagaatagtggacccagaaagatgcagagcaaaatactgtgtctgttactgctaacactgggctggaaaatgcagcattgcagctgtggccatgcaggcttgctaataccttgcttttgagttagacctacctgcctagtccctgtcgcagctgacagctgctggtactgggggcatatgaaggggaagaaatggtgcctccaggaaggagagaagaggctgagccaaggagccttgttttttccctcccaaactcaccaatcagatagatcttttctcctcttctgggcagagtaggagaggcaggtggggagaggtgaggaggctaccatagtcaaaggcctctcccagaatgtgaagaatggtgagcccccctcacatgacaaatgccctgaagtgggcactggtggggctgctaccaaggcccctgtgcaggagttagaccactgagcattctctaatcttgggtgaatctgctggagggtttcaaacaggggtttgggatgggtcatcatcaaatagtttcatgaaaatcaactctgttcctccatttctgatgacttatctgtgagcacgctggcatgtgtggggcacaaagagtttcaggtgtgcagatgggtgtgcatatttccgtggagggttgaatgcaagaaggagcaggtcttctcatttcttagatcaatgagtttttgagaagtgtgaatctctacctgttttgtttttcatttcaggagcccagatacatttaatacttttggtactggggctattgataaagacgaacatctttctagggctaatgaagagcaagctcgcaggccctgcacatgttcaggcctcagcatctctaaaccagaggttgtgcagccctggaactggtttccctgtctctgctatctaccctctttaacacagtggtagcagagtgtccttctaagaccaggtctaatggtattcaccttctccaaaacctctaagggctttccatgtcctaaaacatgaagtacaaatctcttgtgtggcattaaaagcctgccctgatctggcctcaaaggacatttccagcaataattccccttggcccactttaagttttgctccacactctactcaagctgaagtaccttccctccctccctccccttctttccttctttccttccctccctcagcattgggaaagacctcaacatcttggattatgtgatagtctcctaaggggtctcactgcttctactttgacccccctactgtctattcttacctcagcaaccagaccaatcctatttaaaacctaagccagggggaggagccaagatggccgaataagaacagctccagtctacagctcccagcatgagcgaagcagaagacgggtgatttctacatttccatctgaggtactgggttcatctcactaggaagtgccagacagtgggcgcaggtcagtgggtgcagtgcaccgtgcgcgatcggaagcagggtgaggcattgcctcacttggtaagcacaaggggtcagggagttccctttcctagtcaaagaaaggggtgacagatggcacctggaaaatcgggtcactcccacctgaatactgcgcttttccgacgggcttaaaaaacggcgcaccaggagattatatcccacacctggctcagagggtcctacgcccacggagtctcgctgattgctagcacagcagtctgagtttaaacggcaaggtggcagtgaggctgggggggggggcgcccaccattgcccaggcttgcttaggtaaacaaagcagccagaaagctccaacttggtggaccccaccacagctcaaggaggcctgcctgcctctgtaggcttcacttctgggggcagggcacagacaaacaaaaagacagcagtaacctctgcagacttaaatgtccctgtctgacagctttgaagagagcagtggttctcccagcatgcagctggagatctgagaatgggcagactgcctcctcaagtgggtccctgacccctgacccctgagcagcctaactgggaggcaccccccagtaggggcagactgacaactcacacggctgggtactcctctgagacaaaacttccagaggaacaatcagacagcagcattcgcagttcatgaaaaaccactgttctgcagacaccactgctgatacccaggcaaacaaggtctggagtggacctctagcaaactccaacagacctgcagctgagggtcctgtctgttagaaggaaaactaacaaacagaaaggacatccacaccaaaaacccatctgtacatcagcatcattaaagaccaaaagtagataaaaccacaaagatggggaaaaaacagagcagaaaaactggaaactctaaaaagcagagcacctctcctcctttgttcctcaccagcaatggaacaaagctggacggagaatgactttgatgagttgagagaagaaggcttcagacgatcaaactacgagctacaggaggaaattcaaatcaaaggcaaagaagttaaaaactttgaaaaaaatttagatgaatgtataactagaataaccaatacagagaagtgcttagaggacctgatggagctgaaagccaaggcaagagaactatgtgaagaatgcagaagcctcaggagcagatgcgatcaactggaagaaagggtatcagtgatggaagatgaaatgaatgaaatgaagcaagaagggaagtttagag

SEQ ID NO: 4519 - DNA, 3668 bp, Homo sapiens
ttttttggtttgtttgcaaacgtcgaactgccaagagttctgagctccttgggttggggaaaggcacctgggccaccgggtacttcatgcacccacctggccccgaggggcggcgggagctgactttccttgagcaccagatgccccgaaccggtccagccttccaggtcgccctccagcctccgggctgccctgcgcccccggctatctgcagctcaccgcgccaggccccgggcccagcgtcctggacgggcccagagaaagcagagaagtggccacgtggcgctatggcggtcactaccgggaattaaccacggccaccctctcagagcgccgggcgcggactcagggacacgccggctaccacctgagccgggagccgagcaacggcaccgccgccagcgagcccagaccactgtccaaagcttcccagggctcccaggccctcgagtcctcccaaggcagcaggtcctccagcctggacgccctgggccccaccaggaaggaggaggaagcgtcattctggaagatcaatgctgagcggtcccgaggggaggggcctgaggccgagttccagtcgctgacccctagccagatcaagtccatggagaagggggaaaaggtcttgcctccctgctaccggcaggaacctgccccgaaggacagggaggccaaggtggaaaggcccagcaccctccgtcaggagcagcgtcctcttcccaacgtgagcaccgaacgtgagagaccccagcctgtccaggccttcagcagtgcactgcacgaggctgccccctcccagctcgaggggaagctgccatctcctgatgtcaggcaggacgatggggaagacaccctgttctcggaacccaagtttgcacaggtcagctcaagtaatgtcgtcttgaagacgggatttgattttctggacaattggtaaaatgtattagaaaaatacaatgaagaaccctaaaatgttttccaaagtggtgtggtggaggaggataaaaagggccaccttttcctatgtattttactggtttcttgacactcttttcttaatcatttggaaactggtcaatactgccagatttttttcttttttggtagaaccagatatatatgctattttcagtgatttgataacagaagttttccatttggaatttttaaggtctgttaataattcaggagatcttgtaaataaaacttctgttcccagctccacccaactttccccctcctcaaaggatgtgtttcaaccatgtcacaaaaatcatataagtgatttccatctccttctccattattccccctcccccctccgctttttaccgtatgggttccttttggtgggtgattgagggtgatgttatcagccatgacatcagcatgctggctgtgaccccggaaagactggcccccagcgacgttctcagccagcgctcgcagctgtccggggcttctctggcagaagccatgtctctcacatcatgtgccagcctccaccctcacgccatttccagggaacagactgcgggtatgtagcagtgtagtctttaacctgctctgatacatattcagagtatggattgttgtttaaaaagagttgcatgtttaaagagttttgtactagcttttcattattttgtatctagattatcaacaatggggctaccactttccttggttttatatccatttcctcttggaagttcttgttgcttatgtgacctgttggttgttccccggactgggcacctgcaggagtcagggcagacggcagatgtggctggaggtcagggctcttctgcttagttgtgttagagtcttccagcatgggactgatgggagcagtgggcattctttatcccaagggctagccaggttgcgtcatgacggaccttccccagccctgaccaccaccaaaagtggaagagtggagtttgcggtcaactcagcagtgcccatggagacctgcgtggtgtcagagcagcagtatctcttggagctggtgcagacaccaaggctgcccagtggtacaacgtggtccacctcccctagggaagctgctgcactcagaggctgtcctgcccagtggcccctgagccgtgtgagcctgcaggaggcgtctgagcagagcctcaagcccggtatggcgccatctccatgttgccatcactgcgttctcacctgaagccttaatctttgcgacacctgccagtgagcgctcggtttcaataccaaagtgtgtcttcttctttttttttttttttaaatgcctgtttcataggaccttctgaaatgatttccagaatattttatctggctccaaaataaagcacatagcaactcacctcaacccctcatcatctccaggaaagtttctgccaaagctgtggcatagccaacttttgatttggttcttgccaattgttttatgtccctaaacctcatttggatccttggggtatagttttatctttctgcttcagtgatttactgtaacttttcaaatattggttctttctgtaccatttaagtatagttgatatatgtgaggcaaaaaaaggtttcagcatggtggtgagggaaaaaggagcttagaaatcccagttggcacagcctgggcaagcgccagctcccctcagggctaacggcactgttcacacagggatcctcagaatcagcggccacctgcctccaccttctgcctggagggcatggggctgttgtagaacctatggtagcaaatgtatatgtatgagtttgtattctgtagtgttggtgtagcacagaagaaagacctgtgtcctagagagtaggccaaggtgatctgcctcttctattgggagaaattctaatttctttcccactttctcaacaagcccaatattccctccaagttcttcttggtgctgagggctgtaggaattattgaaagcttctgcctcacttagtatcgtctggggcccagcacccagcaataactctaataatgtttcttaatggtatagcctcctgagattaaatgtaaaatcaaaaattaggaaatcttggagggagtcctcaagttgtattgctttgctgtgcttttggaagaagggacgacctggaggacacaggctcatgtgtgggtcttcatcctgcctgaccggcagatcttcctctacaccttgggcaaagtctatgcggagatggtttcttagctctccatttgccatgattttcctcccattcatcatgagggagtttctcaaaccaggagtttatatttattttttagaaaatacacacttttcaggagaaacctgagcatgattttggattctccacctccccccagtctctgcacctgggattcagctcaaggattcagtgtcttcatttttacaaaagttcccccaagaaatcagcaaccagcctctgtttcatctgggagcccctcccttggccccctgggtttgggggtgctgccctactgggaacagcgggggtctgtcacccgtctgagccgcacccccctgtgtggatttcaggaagagcctccctttctttgcgtctccctttctttaattaacattttcaaaagtaataaattcttactgacgacttgtaacttagtcatattttatacttgtagcctttaataaagccatttaaaaaatgct

SEQ ID NO: 4520 - DNA, 3120 bp, Homo sapiens
aattgacaaagtcacgtgtgctcagggggccagaaactggagagaggagagaaaaaaaatcaaaagaaggaaagcacattagaccatgcgagctaaatttgtgatcgcacaaaatcaagatgttagattgatgcagaagatcactccgttccaaagggaaagttttcatctcacgagtttggagctgagggcccgtggggcaacatggccgaaggcggggctagcaaaggtggtggagaagagcccgggaagctgccggagccggcagaggaggaatcccaggttttgcgcggaactggccactgtaagtggttcaatgtgcgcatgggatttggattcatctccatgataaaccgagagggaagccccttggatattccagtcgatgtatttgtacaccaaagcaaactattcatggaaggatttagaagcctaaaagaaggagaaccagtggaattcacatttaaaaaatcttccaaaggccttgagtcaatacgggtaacaggacctggtgggagcccctgtttaggaagtgaaagaagacccaaagggaagacactacagaaaagaaaaccaaagggagatagatgctacaactgtggtggccttgatcatcatgctaaggaatgtagtctacctcctcagccaaagaagtgccattactgtcagagcatcatgcacatggtggcaaactgcccacataaaaatgttgcacagccacccgcgagttctcagggaagacaggaagcagaatcccagccatgcacttcaactctccctcgagaagtgggaggcgggcatggctgtacatcaccaccgtttcctcaggaggctagggcagagatctcagaacggtcaggcaggtcacctcaagaagcttcctccacgaagtcatctatagcaccagaagagcaaagcaaaaaggggccttcagttcaaaaaaggaaaaagacataacaggtcttcttcatatgttctttcctttacccggttgcaaagtctacctcatgcaagtataggggaacagtatttcacaagcagtagctgacctgggattttaactactattggggaactgtgaattttttaaacagacaaatcactctaagcaaattacatttgagcagggtgtcatgttttatgttaattcagagaataagatactatgtctgtcaatatgtgcatgtgtgagagggagagagcctgagtctgtgtgtgtacatgaggatttttatataggaatgtagacacatatataaagaggctttgtctttatatatttgtgtatagatcaaagcacacaccctctctcatataattggatatttccaagaattgaaaacccatgtgaagcattatagatagttttaaatttaacccactggagttttcttgaaataccacttcttttatattatataaaactaaaaacacgactgttaccttttgtgtgaaccaaaggatacttcagatctcagagctgccaattatggggtactaaaggtttttaagacatccagttctcccgaatttgggattgcctctttttcttgaaatctctggagtagtaatttttttcccccttttttgaaggcagtaccttaacttcatatgcctctgactgccataagcttttttgattctgggataacataactccagaaaagacaatgaatgtgtaatttgggccgatatttcactgttttaaattctgtgtttaattgtaaaattagatgcctattaagagaaatgaaggggaggatcatcttagtggcttgttttcagtagtattttaatatcagcttcttgtaaccttttccatgttgtgagggttgtaagggattgtgtggcaacagcagcttcccttggctaactcaatcttctacccattgcttagagcagggagccctccttatttactactgaagaccttagagaactccaattgtttggcatatatttttggtggtggtttttattcctcctggagagttatctaatttgtttctaaaacaaacaagcagcaaagaaatgaattaaatactggggttgagaattaaaattaagtggatgttcacagttgcccaatatatatgacctgcaaatgatacgaaaaagtgcagcatttagtggcagttaacaagagtgacaagcctggggcagaggtaccaaacctctcccaccagagagctagaagtattttatacagtaactttgatcttatggaagtgaccttcaatgcttattctgaagtaacctatatggtggatacaggatgaacattcagtgccagggagaatcttctcaggttggttctcgttagagtgataaactggctaggggccatagtattggtcctgttaggtttcggtcatggaaaaaaaaaatattttggggtcatcctggctctagatgttatgggcaaatttctgaaacatctgcaagaaggtaccagttaattatagtgcttaatattgggaataagattaagcattataattataatgtatgggcctgttggtgtaagctcagataattaaataaaaatagcatgactcaaatgagacatattctgctgaacagtttctacttcctctcccgcctgtcctgtcatgggagacgtgtatagttgctgctgtttcagcaaaccaccataagacgaaaatgcctcaggttgggttgccagtcctttacaactcagcttgaatttcacaacagtgattgtgagaatctgcgtggtatacactgaaatatcggtgtgctgtgatgcaaaacttgcctttgacgatattgaatgtgatatagctgtagagaagtacttccttgccttatgtgaggatttcaaacttatttaaattatgtagacaaatcaaagtggcattgcttaatttttagcaggcataataagcaagttaacagtaaaatgcaaaacatgataagcgttgctcaatttttagcaggtataataagcaggttaacagtaaaaatgcaaaacatgatagataagtcactttgaaaattcaaaccaaagttccttcaccttatggaaataggaaattatggacttcaaaattggacacttcctgtttacaaaaagaaattcagagctaaaatcatggt

SEQ ID NO: 4521 - DNA, 3961 bp, Homo sapiens
atgacatccggaaagccagagagaaataccaaggtgaggaactggcgaaggagctagctcggatcaagctccgcatggataatactgaggttctgacctcagacatcatcattaacttactcctgtcctaccgtgatatccaggactatgatgcgatggtgaagctggtggaaacactggagatgctgcctacgtgtgatttggccgatcagcataacattaaattccactatgcgtttgcactgaataggagaaacagcacaggtgaccgtgagaaggctctgcagatcatgctccaggttctgcagagctgtgatcacccgggccccgacatgttctgcctgtgtgggaggatctacaaggacatcttcttggattcagactgcaaagatgacaccagccgcgacagcgccattgagtggtatcgcaaagggtttgaactccagtcatccctctattcgggaattaatcttgcagttttgctgattgttgctggacaacaatttgaaacttccttggaactaaggaaaataggtgtccggctgaacagtttgttgggaagaaaagggagcttggagaaaatgaacaattactgggatgtgggtcagttcttcagcgtcagcatgctggcccatgatgtcgggaaagccgtccaggcagcagagaggttgttcaaactgaaacctccagtctggtacctgcgatcattagttcagaacttgttactaattcggcgcttcaagaaaaccattattgaacactcgcccaggcaagagcggctgaacttctggttagatataatttttgaggcaacaaatgaagtcactaatggactcagatttccattatgaaatatttcaaacctactgaaaggtacaaaaaaataatggagcagacaaccgcgtaatctctaaccaggttctggtcatagagccaaccaaagtgtaccagccttcttatgtttccataaacaatgaagccgaggagagaacagtttctttatggcatgtctcacccacagaaatgaaacagatgcacgaatggaattttacagcctcttccataaagggaataagcctatcaaagtttgatgaaaggtgttgttttctttatgtccatgataattctgatgactttcaaatctacttttccaccgaagagcagtgcagtagatttttctctttggtcaaagagatgataaccaatacagcaggcagtacggtggagctggagggagagaccgatggagacaccttggagtatgagtatgaccatgatgcaaatggtgagagagttgtcttggggaaaggcacgtatgggattgtgtatgctggccgagatctgagcaatcaagtgcgaatagccatcaaagaaatcccggagagagatagcaggtattctcagcctctgcacgaggagatagccctgcacaagtaccttaagcaccgcaatatcgttcagtacctgggctctgtttcagagaacggctacattaagatatttatggagcaggtgcctggaggaagcctttctgctcttctgcgatccaaatgggggccgatgaaggaaccgacaatcaagttttacaccaaacagatcctggagggccttaagtatcttcatgaaaaccagatcgtgcacagagacataaagggcgataatgttctggtgaacacctacagcggagtggtgaaaatctccgattttggaacctcgaaacgtcttgcgggtgtgaacccctgcacagagacttttactggcaccctgcagtacatggcacctgagataattgaccaagggcctcgcggatatggtgccccagccgatatctggtccctgggctgcaccatcattgagatggccaccagcaagcctccgttccatgagcttggtgagccgcaggcagccatgttcaaagtgggcatgtttaagatccaccctgagattccagaagccctttcagctgaagcccgagccttcattttatcctgtttcgagcctgacccccacaaacgtgccaccactgctgagctactgagagagggtttcttaaggcaggtgaacaagggcaagaagaaccgaattgccttcaagccctcagaaggtccccgcggtgtcgtcctggccctgcccacacagggagagcccatggccaccagcagcagcgagcacggctctgtctccccagactccgacgcccagcctgacgcactctttgagaggacccgggcgcccaggcaccaccttggccacctcctcagtgttccagacgagagctcagccttggaagaccggggcttggcctcgtccccggaggacagggaccagggcctcttcctgctacgcaaggacagtgagcgccgtgccatcctgtacaaaatcctctgggaggagcagaaccaggtggcttccaacctgcaggagtgtgtggcccagagttccgaagagttgcatctctcagttggacacatcaagcaaatcattgggatcctgagggacttcatccgctccccagagcaccgggtgatggcgaccacaatatcaaagctcaaggtggacctggactttgacagctcgtccatcagtcagattcacctggtgctgttcggatttcaggatgccgtaaataaaattttgaggaaccacttaattaggccccactggatgttcgcgatggacaacatcatccgccgagcggtgcaggccgcggtcaccattctcatcccagagctccgagcccactttgagcctacctgtgagactgaaggggtagataaggacatggatgaagcggaagagggctatcccccagccaccggacctggccaggaggcccagccccaccagcagcacctgagcctccagctgggtgagctcagacaggagaccaacagacttttggaacacctagttgaaaaagagagagagtaccagaatcttctgcggcaaactctagaacagaaaactcaagaattgtatcaccttcagttaaaattaaaatcgaattgtattacagagaacccagcaggcccctacgggcagagaacagataaagagcttatagactggttgcggctgcaaggagctgatgcaaagacaattgaaaagattgttgaagagggttatacactttcggatattcttaatgagatcactaaggaagatctaagataccttcgactacggggtggtctcctctgcagactctggagtgcggtctcccagtacagaagggctcaggaggcctcagaaaccaaagacaaggcttgataccaatcagctaagctgtggcagagtgtcccaccacgctacatgttttgttaaagcttctgttagtgtatacacgaattccgctgtgtttacatatttaaaaatgccattgttcaattaatagtttaagaacttgttttaaatactgtcctgagtttcttttgaaacctgttatttataaacatagaactgtgtgtattgtgaaaacagtgagccttggttttgacctcccggaatattaggaaattcacttgtagtcccagctatgcaggaggctgaggtgggaggattgcttgagcccaggaggtgtggaggctgcagtgagccatgatcacaccactgcactccagcctgggcaacagagcccgaccctgtctcaaaaaaagtacacccttcagcacttgctggaatggtgaaacaaacaaggggtatttaacaaacatggaagctgggacactgcctcagaactggtatggtacttcaatttgagaaacacaaaactgatacgaatgtgccttgtagttaatgtttgatatgaacagaaaatagcttcatatttatactgaatgtgtaagtagagaaaactaagttatgtggcctttgaaatgattacaaaattggaatgattacaaaagtcttattttaaaatggaactgtcctcttgcctgataataaatattgtatcttgtag

SEQ ID NO: 4522 - DNA, 2622 bp, Homo sapiens
agttgctgggagggtggcatgctccaactccacagggacagaagctcctactctagagacccttctggacctcactgtaggtacttcttcatctggctgctcatctgtatcctttataataaagaaggaatagtaagacagaaagcaaagatgctttttactttgctgggatgtttcgcatcaccaacattgagtttcttcccgaataccgacaaaaggagtccagggaatttctttcagtgtcacggactgtgcagcaagtgataaacctggtttatacaacatctgccttctccaaattttatgagcagtctgttgttgcagatgtcagcaacaacaaaggcggcctccttgtccacttttggattgtttttgtcatgccacgtgccaaaggccacatcttctgtgaagactgtgttgccgccatcttgaaggactccatccagacaagcatcataaaccggacctctgtggggagcttgcagggactggctgtggacatggactctgtggtactaaatgaagtcctggggctgactctcattgtctggattgactgacatgcctattcttgaaatgacttctttgactctgattggccagcctgggttatgtgcccacctctgaaactagggacaaaggctgctctcagtacttctatgcagagcatctgtctctccactacccgctggagatttctgcagcctcagggaggctgatgtgtcacttcaagctggtggccatagtgggctacctgattcgtctctcaatcaagtccatccaaatcgaagccgacaactgtgtcactgactccctgaccatttacgactcccttttgcccatccggagcagcatcttgtacagaatttgtgaacccacaagaacattaatgtcatttgtttctacaaataatctcatgttggtgacatttaagtctcctcatatacggaggctctcaggaatccgggcatattttgaggtcattccagaacaaaagtgtgaaaacacagtgttggtcaaagacatcactggctttgaagggaaaatttcaagcccatattacccgagctactatcctccaaaatgcaagtgtacctggaaatttcagacttctctatcaactcttggcatagcactgaaattctataactattcaataaccaagaagagtatgaaaggctgtgagcatggatggtgggaaattaatgagcacatgtactgtggctcctacatggatcatcagacaatttttcgagtgcccagccctctggttcacattcagctccagtgcagttcaaggctttcagacaagccacttttggcagaatatggcagttacaacatcagtcaaccctgccctgttggatcttttagatgctcctccggtttatgtgtccctcaggcccagcgttgtgatggagtaaatgactgctttgatgaaagtgatgaactgttttgcgtgagccctcaacctgcctgcaataccagctccttcaggcagcatggccctctcatctgtgatggcttcagggactgtgagaatggccgggatgagcaaaactgcactcaaagtattccatgcaacaacagaacttttaagtgtggcaatgatatttgctttaggaaacaaaatgcaaaatgtgatgggacagtggattgtccagatggaagtgatgaagaaggctgcacctgcagcaggagttcctccgcccttcaccgcatcatcggaggcacagacaccctggaggggggttggccgtggcaggtcagcctccactttgttggatctgcctactgtggtgcctcagtcatctccagggagtggcttctttctgcagcccactgttttcatggaaacaggctgtcagatcccacaccatggactgcacacctcgggatgtatgttcaggggaatgccaagtttgtctccccggtgagaagaattgtggtccacgagtactataacagtcagacttttgattatgatattgctttgctacagctcagtattgcctggcctgagaccctgaaacagctcattcagccaatatgcattcctcccactggtcagagagttcgcagtggggagaagtgctgggtaactggctgggggcgaagacacgaagcagataataaaggctccctcgttctgcagcaagcggaggtagagctcattgatcaaacgctctgtgtttccacctacgggatcatcacttctcggatgctctgtgcaggcataatgtcaggcaagagagatgcctgcaaaggagattcgggtggacctttatcttgtcgaagaaaaagtgatggaaaatggattttgactggcattgttagctggggacatggatgtggacgaccaaactttcctggtgtttacacaagggtgtcaaactttgttccctggattcataaatatgtcccttctcttttgtaattgtaccagttgtatttttactgtgatttatgttaaaaatagatactttaaaatgatgcagtaattggctgggtgcgctggctcacacctgtaatcccagcacgttgggaggccgaggcgggcagatcacgaggtcaggaggtcaagaccatcctggctaacatggtgaaaccctgtctctactg

SEQ ID NO: 4523 - DNA, 4066 bp, Homo sapiens
acaggtttacaaaggttttgttcaaggactcagtgtaacctgtagacacacacactctgaggctaaatattaaaatagaggccattggtgagatctctaaatgaggatccttgagtattcagttagacagctggtatctttcacttacataccaaagtgctttttcataggggaattcttaagactgagaatgacattttgttgtggcttttgcgaacttataaactctgctgattacttatataaaggcttttggccattgggtgggaggggaattatcatgaagaaaattactagggaaactacacggtggcattcagccaagagctggtattgatttgatttagtcacactatgtcatgtggcttctataggaccattagcgaccattgtcctttgttttaagtcacagaatgtacactgggatttcgagtctaagacatcaagctcctcttgtcccctggagggaatattcagggcactgacttaagtctagtcaagaagagtcatggtgggaaatccagcctcctctggctaagcctgctcagtccccaaagatgagctctgcaactttcagcaaccattcagacattctttatgagtcacctgccacctgcaagccactttgaggaaaatggttggtcttctcttccatgctccaaaagcccctgagatggcccctctgcgttgctgcattatgaataaaatcatcatggtcaggcgacccaagcagagcacagctgactatggtatgaggaccagtggccctgtggaaagcggtctcagtgctgactcgctgcagcttctttgtagctatgcagcaatcaagaatagtgctgagctcttgatggtggggccccaaggtatgaggccagccacaggccaagacttgctgtgtaggccttgcctgtcacatgatctgccaggccctcttcatcctccccgtggcctctcaggatcttcttccctgctgatctctcccaggctccaggatgtgtccctgcagttggttcatcccaccccagaggagtctttctaaactgtggctcggaacttgtcagttgcttaggcaccacctcctcacacttccaaggccttcctttcccagcctcgttagccactgggctgctctttctcacacactcaggtatccgccatgccacctgcccttaaccctccttcactcagcatttgcttgatgctgggtcctgggtaagacaactctcaacctattgcgggatctggccagcagtctgcaatgcaacggtgctctctctttgttcccaggcagatcggcaggtcgagaaataatagacacacgcaagatagcaaaatctgggtccaggggggtcaccgccttctgctcccacggtgccaacaacgcactggatataccggcatttattattaagtttggtgagagggcaggggaaggttagtgagggatttagggtcatttgattatgaggtgagatggtcacatggggatgaagtaattctttaacataacatctgtatgcagaagtacagtatacagggataagaatttatgatatagtgtgtgcatcagtagtttctaacagagccttaaaacagaaacacagtctttccatgacctatgattagcaagatattaatcagcagtaacagttgcagcaaaagctggttacaaacaatccatagaaacaggatgtgaagctagacaaccggttagaccagaaattctcagaagggagtatgccttaaccctaaagaggcctagaagagccgtggcgagatgagggcgtttatagccctatcttatccatatggacaggtgctcctcatgcatccgtttataggctctccacaagggtcacattccattcccagagctatgaacatctgcttttctaggataggaatcttggtgatgtgaaacctccctgactgcacgtccattcataggctctctgcaggggaaagcacatcacgtgctgttggctcattctggcagtccaacctggcattgtctttacacaatcctgcatgcaattatgtatttacaataatcaggagcatttcatcttttattccatagcaatagtttcagggggtctccctacatcaacctctggttccctctggtgctgttttctgagcacactgtgaacttccttgctggtaagggtgcttgtgctgcctcccctatgggaatgcccttttcaacccagaagtcactcagcttgtcagggtccaggtcactccatgaggtcagctggcaaggcttattcccaggggctggcccagcacagctctccaccattggttgggtggatcctgaactcctatgaggttgggcatgttgatgagccatctcccctctggactaagaggcccatgaggatggcggagaccacagtgcaaatgtggccctcaatacatgttggatgaggcaagttctatgtcaccaggagctcagtggggtttagcatccttggacatggctccacattagaacagtgataacagaacaattattgtgagctcctattgagacaggaaaatagggcctagaaacagggaacttaaggccactctgtgctaacttcctaaaagagaaaacaccagggtctggaggcaggaaatctaaggccaattcactctgacttcccaaagctggatcaaaaggaaaataccggggtctgggggcaggaaacctaaggctgattaacacaaacttcctaaagctaaaccaaaagacaaaaaccccatctctccatgctgagtaacaaaggatcagaggctactctccctacaaccacccctcttccaccacatctcagatggaaagggaggggagggtgccttgttgaccatgggccaagcagggaccatcccttcatctgcatagggtgccagttcacctcagcctttaattagccacagaccaaatccttcatccagataaggggtagtcattaagaacctcaaatagggtacttaaagcccagaaaactttgtaactgggcccttgagccacttgctcagacccactctcaccttgcagagggctttctcactttaataaattcctgctttcactgctttgttcctgcatttcattcctctgctactttatgcattttgttcaattctttgttcaaaacgccaaagacctggacaactcgtagtcaatctgctgtgctaagtgctctgctagtctgtgtcatttactgtgcacacccatctcttgggtggatattaggaatgagcccatttctccaatgagccaagctaggccatggaggggttgagccatggtgcagtttctgcagtgaagaagcaacagggccagaataggcccacatggtcagactctcagacttacaaccttactcaagtacaatgagtgttccaatgatctgagcagaagaagttgtctttgtaagcagaaaatggctgaagaaagcaaaaagagaaaacagagcagattagtcattgatgtggtttggctgttttgtccctctaaatctcatgttgaaatgtgaccttcagcgttggaggtgggtttagtgggaggtgtttgggtcatagaggtggatctctcataaatggtttggtgctgtccttgtggtaatgagtgagttctctgttaggtacaaaccaccccaaagagcttcttggtactgccaacactccccgcaaacctctccgcgctgcccacccttcccccaaaccttcttacatttccaagcccttatctaggcaccgcagtgaagccagcctgatagaagactttacctatcaggccttgctgcgataaagcaaaccccaattacaaaccatccggaccaaacggggaggttgtgggaagcataaacaaactttacctacaccctccagtaccgtaaacatcacaaggtgatatgtggcagaattaaccagcagacaaccccgggatgcagccataccaaaggactccctcaaactccctgccccaatgtaaaccccctattctgtaagcttggggctgctttccttgactgttaagggggcagccgacaggttaataaaggcttgcctg

SEQ ID NO: 4524 - DNA, 3923 bp, Homo sapiens
cccgagtcgcggggctgccgcttggacgtcgtcctgtctgggtgtcgcgggccggccccgcggggagcgcccccggcgcgatgcccttcaggaaagcctgtgggccaaagctgaccaactcccccaccgtcatcgtcatggtgggcctccccgcccggggcaagacctacatctccaagaagctgactcgctacctctactggattggcgtccccacaaaagtattcaacgtcggggagtatcgccgggaggctgtgaagcagtacagctcctacaacttcttccgccccgacaatgaggaagccatgaaagtccggaagcaatgtgccttagctgccttgagagatgtcaaaagctacctggcgaaagaagggggacaaattgcggttttcgatgccaccaatactactagagagaggagacacatgatccttcattttgccaaagaaaatgactttaaggcgtttttcattgagtcggtgtgcgacgaccctacagttgtggcctccaatatcatgcagaaagccttccagcgtgatttatcagccacccctttgtggtgttgcaggaagttaaaatctccagcccggattacaaagactgcaactcggcagaagccatggacgacttcatgaagaggatcagttgctatgaagccagctaccagccccccgaccccgacaaatgcgacagggacttgtcgctgatcaaggtgattgacgtgggccggaggttcctggtgaaccgggtgcaggaccacatccagagccgcatcgtgtactacctgatgaacatccacgtgcagccgcgtaccatctacctgtgccggcacggcgagaacgagcacaacctccagggccgcatcgggggcgactcaggcctgtccagccggggcaagaagtttgccagtgctctgagcaagttcgtggaggagcagaacctgaaggacctgcgcgtgtggaccagccagctgaagagcaccatccagacggccgaggcgctgcggctgccctacgagcagtggaaggcgctcaatgagatcgacgcgaggagatgccctacctgaaatgccctcttcacaccgtcctgaaactgacgcctgtcgcttatggatgcaaagaagggacctaacccgctcatgagacgcaatagtgtcaccccgctagccagccccgaacccaccaaaaagcctcgcatcaacagctttgaggagcatgtggcctccacctcggctgccctgcccagctgcctgcccccggaggtgcccacgcagctgcctggacaaaacatgaaaggctcccggagcagcgctgactcctccaggaaacactgaggcagacgtgtcggttccattccatttccatttctgcagcttagcttgtgttctgccctccgcccgaggcaaaacgtatcctgaggacttcttccggagagggtggggtggagcagcgggggagccttggccgaagagaaccatgcttggcaccgtctgtgtcccctcggccgctggacaccagaaagccacgtgggtccctggcgccctgcctttagccgtggggcccccacctccactctctgggtttcctaggaatgtccagcctcggagaccttcacaaagccttgggagggtgatgagtgctggtcctgacaagaggccgctggggacactgtgctgttttgtttcgtttctgtgatctcccggcacgtttggagctgggaagaccacactggtggcagaatcctaaaattaaaggaggcaggctcctagttgctgaaagttaaggaatgtgtaaaacctccacgtgactgtttggtgcatcttgacctgggaagacgcctcatgggaacgaacttggacaggtgttgggttgaggcctcttctgcaggaagtccctgagctgagacgcaagttggctgggtggtccgcaccctggctctcctgcaggtccacacaccttccaggcctgtggcctgcctccaaagatgtgcaagggcaggctggctgcacggggagagggaagtattttgctgaaatatgagaactggggcctcctgctcccagggagctccagggcccctctctcctcccacctggacttggggggaactgagaaacactttcctggagctgctggcttttgcactttttttgatggcagaagtgtgacctgagagtcccaccttctcttcaggaacgtagatgttggggtgtgttgccctggggggcttggaacctctgaaggtggggagcggaacacctggcatccttccccagcacttgcattaccgtccctgctcttcccaggtggggacagtggcccaagcaaggcctcactcgcagccacttcttcaagagctgcctgcacactgtcttggagcatctgccttgtgcctggcactctgccggtgccttgggaaggtcggaagagtggactttgtcctggccttcccttcatggcgtctatgacacttttgtggtgatggaaagcatgggacctgtcgtctcagcctgttggtttctcctcattgcctcaaaccctggggtaggtgggacggggggtctcgtgcccagatgaaaccatttggaaactcggcagcagagtttgtccaaatgacccttttcaggatgtctcaaagcttgtgccaaaggtcacttttctttcctgccttctgctgtgagccctgagatcctcctcccagctcaagggacaggtcctgggtgagggtgggagatttagacacctgaaactgggcgtggagagaagagccgttgctgtttgttttttgggaagagcttttaaagaatgcatgtttttttcctggttggaattgagtaggaactgaggctgtgcttcaggtatggtacaatcaagtgggggattttcatgctgaaccattcaagccctccccgcccgttgcacccactttggctggcgtctgctggagaggatgtctctgtccgcattcccgtgcagctccaggctcgcgcagttttctctctccccctggatgttgagtctcatcagaatatgtgggtagggggtggacgtgcacgggtgcatgattgtgcttaacttggttgtatttttcgatttgacatggaaggcctgttgctttgctcttgagaatagtttctcgtgtccccctcgcaggcctcattctttgaacatcgactctgaagtttgatacagataggggcttgatagctgtggtcccctctcccctctgactacctaaaatcaatacctaaatacagaagccttggtctaacacgggacttttagtttgcgaagggcctagatagggagagaggtaacatgaatctggacagggagggagatactatagaaaggagaacactgcctactttgcaagccagtgacctgccttttgaggggacattggacgggggccgggggcgggggttgggtttgagctacagtcatgaacttttggcgtctactgattcctccaactctccaccccacaaaataacggggaccaatatttttaactttgcctatttgtttttgggtgagtttcccccctccttattctgtcctgagaccacgggcaaagctcttcattttgagagagaagaaaaactgtttggaaccacaccaatgatatttttctttgtaatacttgaaatttaattttttattattttgatagcagatgtgctatttatttatttaatatgtataaggagcctaaacaatagaaagctgtagagattgggtttcattgttaattggtttgggagcctcctatgtgtgacttatgacttctctgtgttctgtgtatttgtctgaattaatgacctgggatataaagctatgctagctttcaaacaggagatgcctttcagaaatttgtatattttgcagttgccagaccaataaaatacctggttgaaatac

SEQ ID NO: 4525 - DNA, 2459 bp, Homo sapiens
atctctggctggggcctggagtggggaacggtgcatggggccgacgagtgtcctccgggctggactcactccttcctgtctccccccacccagtggtgctacaaacgggtctgtgtcccctttgggtcgcgcccagagggtgtggacggagcctgggggccgtggactccatggggcgactgcagccggacctgtggcggcggcgtgtcctcttctagccgtcactgcgacagccccaggccaaccatcgggggcaagtactgtctgggtgagagaaggcggcaccgctcctgcaacacggatgactgtccccctggctcccaggacttcagagaagtgcagtgttctgaatttgacagcatccctttccgtgggaaattctacaagtggaaaacgtaccggggaggcctgctcgctcacgtgcctagcggaaggcttcaacttctacacggagagggcggcagccgtggtggacgggacaccctgccgtccagacacggtggacatttgcgtcagtggcgaatgcaagcacgtgggctgcgaccgagtcctgggctccgacctgcgggaggacaagtgccgagtgtgtggcggtgacggcagtgcctgcgagaccatcgagggcgtcttcagcccagcctcacctggggccgggtacgaggatgtcgtctggattcccaaaggctccgtccacatcttcatccaggatctgaacctctctctcaatcacttggccctgaagggagaccaggagtccctgctgctggaggggctgcctgggaccccccagccccaccgtctgcctctagctgggaccacctttcaactgcgacaggggccagaccaggtccagagcctcgaagccctgggaccgattaatgcatctctcatcgtcatggtgctggcccggaccgagctgcctgccctccgctaccgcttcaatgcccccatcgcccgtgactcgctgcccccctactcctggcactatgcgccctggaccaggtgctcggcccagtgtgcaggcggtagccaggtgcaggcggtggagtgccgcaaccagctggacggctccgcggtcgccccccactactgcagtgcccacagcaagctgcccaaaaggcagcgcgcctgcaacacggagccttgccctccagactgggttgtagggaactggtcgctctgcagccgcagctgcgatgcaggcgtgcgcagccgctcggtcgtgtgccagcgccgcgtctctgccgcggaggagaaggcgctggacgacagcgcatgcccgcagccgcgcccacctgtactggaggcctgccacggccccacttgccctccggagtgggcggccctcgactggtctgagtgcacccccagctgcgggccgggcctccgccaccgcgtggtcctttgcaagagcgcagaccaccgcgccacgctgcccccggcgcactgctcacccgccgccaagccaccggccaccatgcgctgcaacttgcgccgctgccccccggcccgctaggtggctggcgagtggggtgagtgctctgcacagtgcggcgtcgggcagcggcagcgctcggtgcgctgcaccagccacacgggccaggcgtcgcacgagtgcacggaggccctgcggccgcccaccacgcagcagtgtgaggccaagtgcgacagcccaacccccggggacggccctgaagagtgcaaggatgtgaacaaggtcgcctactgccccctggtgctcaaatttcagttctgcagccgagcctacttccgccagatgtgctgcaaaacctgccagggccactagggggcgcgcggcacccggagccacagctggcggggtctccgccgccagccctgcagcgggccggccagagggggccccgggggggcgggaactgggagggaagggtgagacggagccggaagttatttattgggaacccctgcagggccctggctggggggatggagaggggctggctatccccccagagcccctcttcagcatccgccccttccagttcacatagtgagacccccccctccagggtgggtctggggaggggacagctgttcaccccagcaccctttgaacccacccttagggagtccccaacactccccccctcctttgatcggaatatgtactgtgaagagtaggggtggggaggtggtctgccggtgccctgccccccagcactgccctacccctccactccgagctgggggggaatctgtgtctgctatgggaggggggggggtagcaccacctccctgacaccctcccctgacctgactagggggaggatccaccccaacctctgccctgcccgccccaggggcaccccgacatccaggccaccccctcatggtgctacagaccctgccctggggcccacacactcctgccaggaagccctacatcaataaagttctgtcttgtgtagatttctacg

SEQ ID NO: 4526 - DNA, 2816 bp, Homo sapiens
atatatcttcataattatctgaaggtcacagtgggagaacaaaattaaaagaactgagaagacttacaagagaacctcctaagagtcacccaaacaatcggctgagaatgagaagagggtcttgctctgtcacctaggctggagtgcggtggcatgatctcggctcagtgcaatctctgcctcccaggttcgggtgattcttgtgcctcaggctcccaattagctgggactacagtagctgggccagcacacccagaaagcctcacattgtgcagtggagaagctgagagaagaggaaaagaggagtggccagactcccaccactacccaggaccaactcctgctcctgaatcttctgatgggccccacaaggtgacagtgctggctacaatgctatccagccggtggtggccaagttcctgggggatcctagggctgggcccccgaagccctcctcggggatcccagctctgtgccctctatgcctttacttatactggggcagatggccagcaggtgtctctggctgaaggggataggttcctactgcttcgaaagaccaactccgactggtggttggcaagacgcctagaagctccctccacctctcgacccatcttcgtcccagcagcctatatgatagaggaatccatcccttcccagagtccaactaccgtcatccccggccaattgctctggactcctgggccgaagttgtttcatggttccctggaggagttgtctcaggccctcccaagcagggctcaggctagctcggagcagcctcctccacttccccgcaaaatgtgtaggagcgtcagcactgacaatctgagccccagccttctgaagcctttccaggaaggaccaagcggaagatccctctcccaggaaaacttgccgccagaagccagtgccagcacagcgggcccccagcccctcatgtcagagccccctgtgtactgtaacctggtggaccttcgccgctgtcctcggtccccacccccaggccctgcatgccccctgctgcagaggccggatgcctgggagcagcacctggaccccaactctggacgctgcttctacataaattcactgactggctgcaagtcctggaagcccccgcgccgcagtcgcagcgagacgaaccctggctccatggaggggacacagaccctgaagaggaacaatgatgtcctgcaacctcaggcaaagggcttcagatctgacacagggaccccagaaccgcttgacccacagggttcactcagcctcagccaacgcacctcgcagcttgaccctccagccttgcaggcccctcgacctctgccgcagctcctggacgacccccatgaggtggaaaagtcgggtctgctcaacatgaccaagattgcccaaggggggcgcaagctcaggaagaactggggcccgtcttgggtggtgttgacgggtaacagcctggtgttctaccgagagccaccgccgacagcgccctccgcaggctggggaccagcgggtagccggcccgaaagtagcgtggacctgcgcggggcggccctggcgcacggccgccacctgtccagccgccgcaacgtcctgcacatccgcacgatccctggccacgagttcctgctgcagtcggaccacgagacagagctgcgagcctggcaccgcgcgctgcggactgtcatcgagcggctggatcgggagaaccccctggagctgcgtctgtcgggctctggacccgcggagctgagcgccggggaggacgaagaagaggagtcggagctggtgtccaagccgctgctgcgcctcagcagccgccggagctccattcgggggcccgaaggcaccgagcagaaccgcgtgcgcaacaaactaaagcggctcatcgcgaagagaccgcccttacaaagcctgcaggagcggggtctgctccgagaccaggtgttcggctgccagttggaatcactctgccagcgggaaggagacacggtgcccagctttttgcggctctgcattgctgctgtggataaaagaggtctagatgtggatggcatttatcgggtgagcgggaacttggcagtggtccagaagcttcgctttctggtggacagagagcgtgcggtcacctccgatgggaggtatgtgttcccagaacagccaggacaagaaggtcggttagatttggacagtactgagtgggatgacattcatgtggtcaccggagccctgaagctttttctccgggagctgccccagcctctggtgccaccactgctgctgccccatttccgtgctgcccttgcactctctcagatacaagaattaataggctcaatgccaaagcccaaccatgacactctacggtacctcctggagcatttatgcagggtgatagcacactcagataagaatcgcatgacaccccacaacctgggaattgtgtttggaccaaccctgtttcggccagagcaggagacatctgacccagcagcccatgctctctacccagggcagctggtccagctgatgctcaccaacttcaccagcctcttcccctgatgcagggaaggaagaagagaaaacatatttccggtcatctctggtggtgagaggctggtgttctgttttgaggatatccctttaaatctcccaaatgactgtctctatcttcatgagtgtgacttgaggtgttgggatgggtgagggagcttctctaaagaggaaagtgagtggattaacccctgcttctcttcttgttccctgttatcattcctccccaacataataatacataaagtggcatggtattt

SEQ ID NO: 4527 - DNA, 3130 bp, Homo sapiens
tgtttcgggtgccgccatgttggtgaggagaaatcaccgttacggccactgtccaaatccccgcgtcgctgcacgccgcccgcccgctcccacgccacagccaccggcggcgaatagagactagagcggcagcgccggcagcgcggggccgttgcccagtgtttgcagttagagccccatctctctggcgtggttgttaatagactggaaagtctgtgtctgtgtcgctcactagtaaccgtgagtttttaccacttcgtcacctgtcggcggcggccgggagcaggttcccgcaggcggcgcggggggtcttccccgcgccccgccgccgccggcctcgcagacctgccctccagccccgccccgttcttgaccaaacatgacagactctgaacatgcagggcacgacagagaagatggcgaattagaagatggtgaaatagacgatgcaggatttgaagaaatacaagaaaaagaagcaaaagagaatgaaaagcagaaaagtgagaaagcctacagaaaatcaagaaaaaaacataagaaagagagagagaagaaaaaaatccaaaaggagaaaacgtgagaaacataagcataattccccatctagtgatgatagttcggactacagccttgattcagatgttgaacatacagaaagttcccataaaaaaagaactggtttctacagggattatgacattccatttactcagcgtggacatatatcaggaagctacataacatcaaagaagggtcaacataacaaaaaatttaaaagtaaagaatatgatgagtacagcacctacagtgatgacaacttcggtaactacagtgatgacaactttggtaactacggtcaggaaacagaggaagattttgccaatcagctgaaacaatacaggcaagctaaagaaacctcaaatattgctttagggtcatcattttctaaagaatcaggaaaaaaacagagaatgaaaggagttcagcaaggtattgaacagagagttaaaagttttaatgttggtcgtggacgtggcttgccgaagaaaatcaaacgaaaagaacgtgggggaagaaccaataaagggcctaatgtgttttcagtatcggatgactttcaagagtataataaaccagggaaaaaatggaaggttatgactcaggaatttattaatcagcacacagtggaacacaaaggaaaacaaatctgtaaatacttcctggaagggaggtgtattaagggagatcagtgtaaatttgatcatgatgcagagttggagaaaagaaaagagatctgcaaattttatttacaaggatattgtaccaaaggagagaactgcatttatatgcataatgaatttccatgcaagttctatcatagtggagcaaaatgttaccagggagacaactgtaaattttcccatgatgatctaactaaagaaacaaagaaacttttggacaaagtgttgaatactgatgaagaactcataaatgaagatgaaagagaattagaggaacttagaaagcgtggcataactcctcttcccaaaccacctccaggggttgggcttctgccaacccctccagagcattttcccttttctgatcctgaagacgattttcagacagatttctctgatgattttaggaaaattccatctctttttgaaatagttgtaaaacctactgtggatttagcgcataaaattgggaggaagccaccagcattttataccagtgcctcaccaccaggaccacaatttcagggaagcagtccacaccctcaacatatctatagttctgggtcaagtccaggtcctggacctaacatgtctcagggacacagtagtcctgtgatgcacccaggctcccctggacatcacccatgtgcaggacctcctggtctaccagtgccacagagcccacctttaccacctggtccacctgaaattgtaggtcctcaaaatcaagctggagtgcttgttcaaccagacacatctttgacaccaccaagtatgggtggggcttaccactccccaggctttccaggacatgtgatgaaagtacccagagagaatcactgttctccaggttcatcataccagcaaagtcctggtgaaatgcagctcaacaccaattatgagtccctgcaaaacccagctgagttttacgataattactatgcacagcattctatacataattttcagccacccaataactctggtgatgggatgtggcatggtgaatttgcccagcagcagcctcctgttgttcaagactcacctaaccatgggagtgggtctgatggcagcagcactaggacaggccatggccctctgcctgtaccaggcctcctccctgcagtgcaaagagctctttttgtaagacttactcagagataccaagaagatgaagaacaaaccagcacccaacctcatagggcaccaagcaaggaagaagatgatacagttaactggtattccagtagtgaagaggaagaaggaagcagtgtcaaatcaatactgaaaacattacagaaacaaacagaaactttaaggaatcagcaacaaccttccacagaactcagcactcctactgatccaagacttgctaaagagaaaagtaaaggaaaccaagtggttgaccctaggcttaggactatcccaaggcaagacattagaaagccttctgagtctgccccactggatcttagacttgcgtgggatcccaggaaattgagagggaatggaagtggtcacataggctcttctgttggtggagcaaagtttgatttgcatcatgcaaatgctggcactaatgtcaaacacaaaagaggcgatgatgatgatgaagatacagaaagagaactgggagaaaaagctttcttaatacctttggatgcctcacctggcataatgctccaggatccaaggtcacaattgagacagttcagtcacattaaaaaggacattactctaaccaaacccaactttgcaaaacacatcgtgtgggctcccgaagacttacttccagtacctttacctaaacctgatccagtgtcttcaatcaatttacctctgcccccacttatagctgaccagaggctaaatagattatgaaatac

SEQ ID NO: 4528 - DNA, 3049 bp, Homo sapiens
agcgctgcgcgtcagtttccgtctacctggactaaacatttgcttcgccccgtctgcctgaatcgaacgtgcacttggcagtcttcccttgtccatacccgtttcctggggatcgctacggaccttaaaataccagcaacagccccttcgccccaagtaaggtcttgctctgtcagactagagtacagtgccatgatctccgctcactgcagcctcaacctcctgggctcaagcagtctttctgcctcagagtgctgggattacagacgggagccaccacgccaggcctacgagatttgacttgtaaagaattaattatattgactgagagagaagcccagaagaggaagaagaggaaagaaaaggagtcagggatggctcttacacagggacctttgacattcagggatgtagccatagaattctctcaggaggagtggaaatccctggaccctgtgcagaaagctttgtactgggatgtgatgttggagaactacaggaacctggtcttcctgggtatccttcctaaatgtatgaccaaggaattaccaccaatagggaacagtaatacaggagaaaaatgccaaacagtgacgctggaaagacatgaatgttatgatgttgaaaatttttacttaagggaaatccagaaaaatctacaggaccttgagtttcaatggaaagatggtgaaataaattataaagaagtgccaatgacctataaaaacaatcttaatggtaaaagaggtcaacatagtcaagaggatgtagaaaacaaatgtattgaaaatcagcttacattaagctttcagtcacgtctgactgaactgcagaaatttcaaactgaagggaaaatttatgagtgtaaccaatctgagaagacagttaataacagttccctagtttcaccacttcaaagaattcttcctagtgtccaaaccaacatttctaaaaaatatgagaatgagtttttgcagctgtcattacccacccaacttgagaaaacacacattagggaaaaaccttatatatgtaaagggtgtggcaaagcctttagagtgtcttcaagtcttattaaccatcagatggtacatactacagagaaaccttacaaatgcaatgaatgtggcaaagcctttcatcggggctcactactaactatacatcagatagtccatacaagggggaagccatatcaatgtggtgtatgtggcaagatcttcagacaaaattcagatcttgtaaatcaccggagaagtcacactggagagaaaccgtacaaatgtaatgaatgtggcaagtcctttagtcaaagttacaaccttgcaatacatcagagaattcacactggagagaaaccttacaaatgtaatgagtgtgggaaaaccttcaaacaaggctcatgcctcactacacatcagataatccatacaggagagaaaccatatcaatgtgatatatgtggcaaggtcttcaggcagaattctaatcttgtaaatcaccagagaatccacactggagagaaaccatacaaatgcaacatatgtggaaagtcctttagtcaaagttccaacctggcaactcatcagacagttcatagtggaaacaaaccttacaaatgtgatgagtgtggcaaaacctttaaacggagctccagcctcactacacatcaggtaatccatacaggagagaaaccatatacatgtgatgtatgcgacaaggtcttcagtcaacgttcacaacttgcaaggcaccagagaggtcatactggagagaaaccttacaaatgcaatgaatgtggcaaggtcttcagtcagacttcacatcttgtggggcatcggagaattcatactggagagaaaccttacaaatgtgataaatgtggtaaagcctttaaacagggctcattactcactcgacataagataattcataccagagagaaacgttaccaatgcggtgaatgtggaaaggtctttagtgaaaattcatgccttgtaagacatttaagaattcatactggggagcaaccttacaaatgtaatgtgtgtggcaaggtcttcaattacagtggaaacctttcaattcataagagaatacgtacgggagagaaacctttccaatgtaatgaatgtggcacagtcttcaggaactactcatgcctagcacgtcatctaagaattcatactgggcagaaaccttacaaatgtaatgtgtgtggcaaggtcttcaatgacagtggaaacctttcaaatcataagagaattcatactggagagaagccgtttcaatgtaacgaatgcggcaaggttttcagttactactcatgcctagcacgtcatcggaaaattcatgccggagagaaaccttacaaatgtaatgattgtggcaaagcctatactcagcgttcaagcctcactaaacatctgataattcatactggagagaaaccttacaattgtaatgagtttggaggggcatttatccaaagttcaaaacttgcaagatatcacagaaatcctactggggagaaaccacacaaatgtagccattgtggtagaacttttagtcatataacaggcctgacgtaccatcagagaaggcatactggagagatgccatacaaatgtattgaatgtggccaggtctttaattccacttcgaaccttgcaaggcatcggagaattcacactggagagaaaccttacaaatgtaatgaatgtggcaaggtctttcgtcatcaatcaacactagcacgtcatcggagtattcatactggagagaaaccttacgtgtgtagtgagtgtggcaaagcctttagagtgcgttcaattctggttaatcatcagaaaatgcatactggggacaaaccttacaaatgtaatgaatgtggtaaagcttttattgaaaggtcaaagctggtgtaccatcaaagaaatcacactggagagaagccatacaaatgtattgaatgtggcaaggcctttgggcggttttcttgcctcaacaaacaccaaatgattcattctggagaaaaaccttataaatt

SEQ ID NO: 4529 - DNA, 2415 bp, Homo sapiens
attcaggatgggacgaccttataccgcggctctttctggcaaaggtaatgacatacgcatctgtgccagcatcccaagagtgaggctggtttctggaaatccattctgactctgtgacagcggggatggatgtgaccttgcccgtggttagaaaacaaatttactgagttctctgggtgccctgcagacctttggatcctgccaccttgctggacgggagggctctctagctcctgccagcccttagagccacaggaccttggtcacaacatctacagaaggccctgcagctaagtgatctaatccaggatcatatgctgcctttaggtgacacatccctttagtctcctttaatcaggagcagtttctcagtgttcatcttccatgaagtcgacatttttgaagagtataggtgtcagatctttttcaagaacagcagaaaatgatcgaataccagatacctgtgtcattcaaagatgtggttgtgggcttcacccaagaggagtggcaccggctgagtcctgctcagagggccctgtaccgggatgtgatgctggaaacctatagcaacctcgcctcagtgggttatgaaggcaccaaaccagatgtgatcctcagactggagcaggaagaagcaccatggattggtgaggcagcatgcccgggctgccactgttgggaagacatctggcgagttaatatccagaggaaaagacggcaagacatgcttttgaggccaggcgcagccataagcaagaaaacattgcccaaggagaaaagctgtgaatataataagtttgggaaaatatcacttctgagcactgatcttttttcttcaatccagagccctagtaactggaacccttgtggaaagaatttgaaccataatttagacttgattggttttaagagaaactgtgcaaaaaagcaagatgagtgttatgcttatgggaaattgcttcagcgtataaatcatggtagacgacctaatggagaaaagccccggggttgcagtcactgtgagaaagctttcacccagaacccggcacttatgtataaaccagcagtaagtgattctctcttgtacaaacggaagagggttccacctacagaaaaaccccacgtctgtagtgagtgtgggaaagccttctgctacaagtctgaattcattaggcatcagagaagtcacactggggagaagccttatggctgcactgactgtgggaaagccttttcacataagtcaaccctcatcaaacaccagagaattcacactggggtaagaccctttgaatgttttttttgtgggaaagcctttacccagaagtcacaccgcacagaacatcagagaacacacacaggagagagaccctttgtctgcagtgaatgcgggaaatcgtttggtgagaagtcatacctcaatgtacatcgaaaaatgcacacaggagaaagaccgtatcgttgcagagaatgtggaaaatccttcagccagaagtcatgcctcaataaacattggagaactcactttggagaatcttcccttagaagtaaaagctccaatacataaaagacagatgaacatgtgaacatggacatttattgtaaaaattgttcttaatggcaaaaaaacccccaaaaccaaagcaaacactagaatcaaagtaaatacccatcaactgggaaattgtagaaaggaaaaaactatagtgtatccattccatagaatgttaatatagccattaaggtggacaaattaaaactatgctagtggacttgagtggaattccacaatgttctcttgagtgaaaaatgcaaggtagatattaagtatgttaaatatgactccatttttgtaaatcattaacaaaatgtctctaggtgtttgtcagcaataaacggtatctatatatgtttatttgattttatgtgcatgaagaaaagtatagaagagtatgcattgacttggagggaggtgggtaatgcaggtaggttatgggggagtcaggggtgtagggaaaaggaaaaccaaaaaaagaaaaatacataaatgactgaatcacgggtgataccacaaatgtgtgagttagtaaatttggctggggatgagggagctagaattttgctaatttgtggggatgttcatggtatatattgtaaaaagggaaaatttcataataatgtatacgattctatttttaaaaaaagtaaaaactcctgtgtgtgtgtatatatgcatgtggatgtttatatgaacatagaaaagtgtagaagaatacacacgaaggtgttaacattcattggttaccttggtggagaagggtaataagttttctgaatacctttgcattgtcttgttcacatatattgcttttgtaatttgaaaaacaaaataaagggggaaaacatttcaaactg

SEQ ID NO: 4530 - DNA, 3606 bp, Homo sapiens
gatgagaagaaggagctgcattggatggaaggcccacccccgagccaccccctctaccacaccatgccaccgccctgcccaggcagccctgggcacaggagcccacagagatgagaggcaagaagacccagggagaaggccactgagatgaggggagagggctacagagatgaagagaaatgaagagaagagagacagccgtcaagactgtccagagaagtgggctgaggcccacaaaccccacaaggacaaggacaggaaaagcccagggataagaaagaaaggcccatggagacaagggagcagcctacagagacaagcaaaaggacctcggagacaaggggcagtaatgtggacatagagacctcccgcgaaggaaaacgggagaagccagagacacaagagagaggcccctggaaacagaaagcactcctcagatatggggagcggtccacagggcagggagagagccaaggagagccgaagaaggtcacagaaacaagggaggcctacagacaccagggtaccaaaaagacaaggatgtggctcatagacacaagagagccactgaggcaggagctgccagcctggagatgcggggcaagcctcccccaatataaatagctcctatagagcccagggccttgctgccgccatgactgaggaatcagaggagacagtcctgtacattgagcaccgctatgtctgctctgagtgcaaccagctgtatggatcactggaagaggtgcttatgcaccaaaactcccacgtgccccagcagcactttgagctggtgggcgtggctgatcccggagtcactgtggccacagacacagcttcaggcacgggcctctatcagacccttgtgcaggagagccagtaccagtgcctggagtgtggtcaactgctgatgtcacccagccagctcctggagcaccaggagctgcacctgaagatgatggcaccccaggaggcagtgccagctgagccatcacctaaggcaccacccctgagctccagcaccatccactacgagtgtgtggattgcaaggccctctttgccagccaggagctctggctgaaccaccggcagacgcacctccgggccacacccaccaaggctcctgcccctgttgtcctggggtccccagttgttctagggcctcctgtgggccaggcccgagtggctgtggagcactcataccgaaaggcagaagagggtggggaaggggcgactgtcccatctgccgctgccaccaccactgaggtagtgactgaggtggagctgctcctctacaagtgctctgagtgctcccagctcttccagctgccggcggatttcctggagcaccaggccactcacttccctgctcctgtacccgagtctcaggagcctgccttacagcaggaggtgcaggcctcgtcacctgcagaggtgcctgtgtctcagcctgaccccttgccagcttctgaccacagttacgagctgcgcaatggtgaagccattgggcgggatcgccgggggcgcagggcccggaggaacaacagtggagaagcaggcggggcagccacacaggagctcttctgctcagcctgtgaccagctctttctctcaccccaccagctacagcagcacctgcggagtcatcgggagggcgtctttaagtgccccctgtgcagtcgtgtcttccctagcccttccagtctggaccagcaccttggagaccatagcagcgagtcacacttcctgtgtgtagactgtggcctggccttcggcacagaggccctcctcctggcccaccggcgagcccacaccccgaatcctctgcattcatgtccatgtgggaagacctttgtcaaccttaccaagttcctttatcaccggcgtactcatggggtagggggtgtccctctgcccacaacaccagtcccaccagaggaacctgtcattggtttccctgagccagccccagcagagactggagagccagaggcccctgagccccctgtgtctgaggagacctcagcagggcccgctgccccaggcacctaccgctgcctcctgtgcagccgtgaatttggaaaggccttgcagctgacccggcaccaacgttttgtgcatcggctggagcggcgccataaatgcagcatttgtggcaagatgttcaagaagaagtctcacgtgcgtaaccgcctgcgcacacacacaggggagcggcccttcccctgccctgactgctccaagcccttcaactcacctgccaacctggcccgccaccggctcacacacacaggagagcggccctaccggtgtggggactgtggcaaggctttcacgcaaagctccacactgaggcagcaccgcttggtgcatgcccagcacttcccctaccgctgccaggaatgtggggtgcgttttcaccgtccttaccgcctgctcatgcaccgctaccatcacacaggtgaatacccctacaagtgtcgcgagtgcccccgctccttcttgctgcgtcggctgctggaggtgcaccagctcgtggtccatgccgggcgccagccccaccgctgcccatcctgtggggctgccttcccctcctcactgcggctccgggagcaccgctgtgcagccgctgctgcccaggccccacggcgctttgagtgtggcacctgtggcaagaaagtgggctcagctgctcgactgcaggcacacgaggcggcccatgcagctgctgggcctggagaggtcctggctaaggagccccctgcccctcgagccccacgggccactcgtgcaccagttgcctctccagcagcccttggaagcactgctacagcatcccctgcggcccctgcccgccgccggggtctagagtgcagcgagtgcaagaagctgttcagcacagagacgtcactgcaggtgcaccggcgcatccacacaggtgagcggccatacccatgtccagactgtggcaaagcgttccgtcagagtacccacctgaaagaccaccggcgcctgcacacaggtgagcggccctttgcctgtgaagtgtgtggcaaggcctttgccatctccatgcgcctggcagaacatcgccgcatccacacaggcgaacgaccctactcctgccctgactgtggcaagagctaccgctccttctccaacctctggaagcaccgcaagacccatcagcagcagcatcaggcagctgtgcggcagcagctggcagaggcggaggctgccgttggcctggccgtcatggagactgctgtggaggcgctacccctggtggaagccattgagatctaccctctggccgaggctgagggggtccagatcagtggctgactctgcccgacttcctctttggcacctccattccctgttgctgaaggccctccagcatccccttaagcatctgtacatactgtgtcccttcctcttcccatccccaccaccttgtaagttctaaattggatttattctctcgtgaggggggtgctctggggtccttgacacacataaaggtgcccccccaccttccacctcttagcactggtgaccccaaaaatgaaaccatcaataaagactgagttgccaaaaaaaac

SEQ ID NO: 4531 - DNA, 3231 bp, Homo sapiens
attgttctcggtgccccacgggcttgagccggggtgaatctggaggggccgggccgagcccgggggcgctttcgcacgcgaagcaaccgctagagcaggacctggtctcccgagagattttgagatacagagtgaaaatggggagaactgtaatcaagacatgtttgagaatgaatcacgtaagatattctcggaaatgcctgaaggtgaaagtgctcagcactccgatggggaaagtgactttgagagagatgctggcatccagaggctccagggacacaccccaggtgaggaccacggggaggtggtttctcaggacagggaagttggccagctcataggcctgcagggcacctacctaggggagaagccctacgaatgtccccagtgtgggaagaccttcagcccgaaatcccacctcatcacacacgagaggacccacacaggagagaaatactacaaatgtgatgaatgtggaaaaagctttagtgatggttcaaattttagtagacaccaaaccactcacaccggggagaagccctacaaatgcagagactgtgggaagagctttagccggagtgccaacctcataacccaccagaggatccacacgggggaaaagcccttccagtgtgccgagtgtggcaagagcttcagcaggagtcccaacctcattgcacatcagcgcacccacacaggagagaaaccctactcgtgccccgagtgtggaaagagctttggcaaccgatccagccttaacacgcatcaggggatccacactggagaaaagccctacgaatgtaaagaatgcggcgaaagctttagttacaactccaatctaatcagacaccagagaatccacacaggagaggaaccctacaaatgtaccgactgtgggcagaggttcagccagagttcagccctcatcacccaccggagaacccacacaggagagaaaccctaccagtgcagcgagtgtgggaaaagcttcagccgcagctctaacctggccacacaccggagaacccacatggtggagaagccctataagtgtggggtgtgtgggaagagcttcagccagagctccagtctgattgcacaccagggcatgcacacaggggagaaaccctacgagtgcctgacatgtggggagagcttcagctggagctccaacctcctcaagcaccagaggatccacacgggagagaaaccctacaaatgcagcgagtgtgggaaatgcttcagccagcgctcccagctcgtagtgcaccagcggacccacacgggcgagaagccctacaaatgcctcatgtgcggcaagagcttcagccggggctccattctggtcatgcaccagagagcccatttgggagacaagccctacaggtgccctgagtgtgggaaaggctttagctggaactcagtcctcattatacatcagcgaatccacactggggagaagccctacaaatgccccgagtgtggcaaaggcttcagcaacagctctaactttatcacacatcagagaactcacatgaaagagaaactttattgaagtggcaaagagtgaaagtgagggactggcctggagtgggagttgccacactgccccaacagtgattccctttcaaagagctgtgcttcctaaacattctggggggttttgccagagtcttccccttgctcatcctcatttccaggacactgtcattttagtggtctgagtcaagtcccgtatacattcaagaacagggcataggcgtggaaggtctggaaagttgggtctttttcccttacattgggtgacttgattggccccctctcatgattcctctgtgcctcagtttcctctttggtaaaatggggggaaatgtttctccatgtggaatggaagacagcatggcccacaacgtgggccgagtcctcagagaaatactggaaatcattggtgtggttctggttgttttgttgttttgctgccacgttgttgggctaaggtgccttcaccccaagctgttagtgttccagggcaccccaagctgtcagttagaatctgctcttctggctttggtgtcttgggctttgatttcaggtcaagatggaggggcttctccagttctgagtcacccacgtgaaggtaaagaccctttctatttccagaaagtgtcaggagcacagaaacttgaggaagtacagcctggagccagtgtcccagtgtcctttccattggtaagagttggacagggccttcaggaaaggggtaaaccgaggacatttcagtgcttgcttttgtctctgcctactgtcctgtggtagatcagctaccaggggaacacatttgttctcgtggggttttgtcctggagagtgtagtgaagtccgagagccctagctgccaacccatggtggatggtaacttctgtctcatcaagagtaaaacagtcctgcacacagcagggtgggtttgtgcctttggcccaacaggtacatagccccataatttctgaattattctatgcacttgtttccctcttcttttattttttatttgatatatgccgagctagaatcctgtcgggtagcttttgtatactaagaacattattattattattatttttgagacggagtctcactctgtcacccaggctggagtgcagtggtgccatctcagctcactgcaagctccgcctcccgggttcgcgccattctcctgcctcagcctcccgagtagctgggactgcaggtgcccaccaccacacccagctaatttctttttttgtatttttagtagagacggggtttcaccgcgttagccaggatggtttcgatctcctgtcctcgtgatctgcccgccttggcctcccgaagtgctgggattacaggcgtgagccagcgcacccggccaagaacattatttttaaagaagtgttaactttgaggacatatctgttccctggagatatttgggcttgaatcaggagtttgtcctacaggtgtcgcccttgatctcaggatgctaccagggctttgttctcgggatcctcgcacctggagagtgaagacgggcatgacggcaggtgaaggggtttgctgtgaaggaagaggagataaggcatttccaggaaatgggaaactgcctcctcctacacatggggcctgtgctcagaatgggcttagttcttataggatggatgctcagtattccttaataaagtagagttccattctt

SEQ ID NO: 4532 - DNA, 2253 bp, Homo sapiens
aatccaagatggcggcgctaggctgaccctcctgctggtgacggaagtaccgcctcctcccgtctgacgcccctcaggggaccctgcatcgctccagccgccgcggccatgtctgggccaggcaacaaacgcgccgccggcgacgggggctcagggcccccggaaaagaagctgagtcgtgaggagaagaccaccacgactcttatcgagcccattcgtcttggaggcatctcttccacggaggagatggacctgaaggtactacagttcaagaacaagaaactggcagagcggctggaacaacggcaggcttgtgaagatgaactccgagaacgaattgagaagttggagaagcggcaggccacagatgatgccacactcctcatcgtcaatcgctactgggcccagctggatgaaactgtggaagcccttctccgatgccatgagagccgcatccgggaattggaggagagggatcgaagggagagcaagaagatcgcggatgaggatgccctgcggcgcattcggcaggcagaggagcagatagaacacctgcagcgcaagctgggtgccaccaagcaggaggaggaggctctgctctcagagatggatgcccagctgctgactgtgcagaagctggaggagaaggagcgagccttgcagggcagcctcgggggtgtggagaaggagctgacgctgcgcagccaagccctggagctcaacaagcggaaggctgtagaagccgcccagctggccgaggacctgaaggtgcagctggagcacgtgcagactcggctgcgggagatccagccctgcctggcagagagccgggctgctcgtgagaaagagagcttcaacctcaagagggctcaggaggacatctcacggctgcggcgcaagctggaaaagcagaggaaggtggaggtctacgcagatgccgacgaaatcctccaggaggagatcaaggagtacaaggcgcggttgacctgcccctgctgtaacacccgcaagaaggatgcagtccttaccaagtgcttccacgttttctgcttcgagtgcgtgcggggccgctatgaggcccgccagaggaagtgccccaagtgcaacgcggcctttggtgcccacgacttccatcgtatctacatcagctgaacctgaaactcaggggactctggaacaccatggaccctgggggctgtgcccccatctcctccccaccccaggtctagtggccccaccctccattccggaccccatgggcccagcccctgcccatctagttggtttggggaccctggtgcatgctagtgggcatgggatcagccaagcttcgttccatcttttcctaaaggtcagagctgcagcctagggggcactgccctacagaaaaggtctgcctgagaggcctgaggagcccagagcacttgactgagcttcccggaaactggccctaacctgtctgtctccgtggatgcatcctaaccctaaggaaaattccccaggctgtgatctaccctagagaaggctcgctccctgcctactggctcacaaatgaggaccagtgagccatgtccttgttccttgtttgagactgggctgcaggccccaggaagactttccttcacccaccatccccctaacctcggcggggcttctgtcctgtggagttccctggacaccttggtctggctcttgtgccaagggctgaaggaggtaccctcttggcagatgggggcatcacttgcttcctttgggaagctctaaggttgctgcagtcaccttcctcatcttgcaggtgctgaaccaacatcatcagtttctattctaatcaggccccttcccaatctccatttctctgccaagcccatttacccccacctcatgcatcccaaggctctactgggtccctggacctaaccctgctttcatcctggtggccttaactacagtggaggtggaacttcccaggaggggaagggacagaccagccccagccgctgggccaacttccaatcattccagctagaagagcttccccctgacaccctgtgactgagcctgtgtcctgtctgcctgcccagccatgctccatcggctgtgagggcagtgcccggagaggccagagggttggagctgcagggacccgtttggacccacagcctctgttctagagatgcttgtataggctgttaattgtgatgaataaacgttcaaccctcggcctgcagccagagtagccaggccgcgcacccc

SEQ ID NO: 4533 - DNA, 3084 bp, Homo sapiens
gtcggtaaggagacgtagctttccgtggggtgtaccactgcagttggttcccggcgggagacgcaggggatggaagcttcctggcgccaggtggccggtggccgaggccgatcccggggacgggccactgccgccccctcaggaaatggagtccatctccgcggcgccggaggagggcgagagaaggggtcggtgggcgcagttccttctggcaccagtcccggaggagtcgcgaccacggcggctgcagggagcaggcacagccccgcaggatcccaagccctgcagactaccgcagccagcgagctaatgtctcagaaaaaatttgaagaaatcaagaaagctaaccaagctgcagccagaaaacttgttgaagaacagtttagctcttcatctgaagaaggagatgaagattttgaaggaaaacagggaaaaatacttgcaaatacgtttataacatacactactcagacagatggagatacacgtgaattagagcgaacaaaacaatatgtaaatgaagcttttcaagcaggggctatgacatgcctaatttgtattgcttcggtgaagagaaaccaagcagtttggagctgttcgggatgtttctgtatatttcacatgccctgtatccagaagtgggctaaagacagccagtttcttgtatcttctgtgactgatgatgattttggaaagaaagattgtccctggccttgtccaaaatgtaggtttgaatacaaacgatctgaaacacctagtaggtactattgctattgtggaaaagtagaagatccacctttagatccgtggcttgtgcctcattcatgtggccaagtatgtgagcgtgaatttaaacctccttgtggccataaatgtttactcctctgtcatccaggtccctgccctccttgtccaaagatggtcacaactacttgttactgtaagaaggcaaaacctatccctcgtaggtgcagtgccaaggaatggtcttgtcagctgccatgtggacagaagttgctttgtgggcaacataagtgtgaaaatccttgtcatgcaggaagctgtcagccttgtccaagagttagtagacaaaagtgtgtctgtggcaaaaaagtagctgaaagaagttgtgcaagtccactatggcactgtgatcaagtatgtggaaaaacactgccatgtggtaatcacacatgtgagcaagtttgccatgttggtgcttgtggagaatgtcctcgatctgggaaaaggttctgtccatgtcagaaatcaaagttttctttgccttgtacagaagatgtaccaacttgtggagacagttgtgacaaagtacttgaatgcggaatccatagatgttcacagcgttgtcaccgaggtccctgtgaaacatgtagacaagaagtggaaaagcattgtcgctgtggaaagcatacaaaacgaatgccttgtcataaaccttatctgtgtgaaactaagtgtgttaagatgcgtgactgtcagaagcatcaatgtagaagaaagtgttgccctggaaactgtccaccttgtgatcaaaactgtggacggactttaggatgtagaaaccataagtgtccatctgtctgtcacagaggcagttgctatccctgcccagaaaccgtagatgtgaagtgtaattgtggcaatacaaaggtgacagtgccctgtggccgagaacgtaccacaagaccacccaagtgcaaggagcaatgcagtcgaccaccaacttgtcatcatacaagtcaagaaaaacatcgctgtcactttggttcttgtccaccatgtcatcaaccttgccaaaaagttttggagaaatgtggtcacttgtgtcctgctccgtgtcatgatcaagcattaataaagcagactggcaggcaccagcctacaggcccttgggaacagccttctgagccagcatttattcagactgcattaccgtgtcctccatgtcaagttcctattcctatggaatgtcttgggaaacatgaggtgagtccactaccatgccatgctgtaggaccctactcttgtaaaagagtttgtggaagaatcttggattgtcagaatcacacatgtatgaaagaatgccacaaagtaaccaaaactgatggctgcactggaaaaaacaaggctggcccagaatgccttcattgtgaggaagggtgctccaagtcacggccactaggttgtcttcacccatgtattttgcgatgtcaccctggagaatgtccaccttgtgttcagatgcttagaataaaatgtcactgtaagatcacaagcctgtatgtggaatgtagaaaaataaccacagctgatgtaaatgaaaagaacctcctcagttgttgcaaaaatcagtgccctaaagagcttccttgtggtcatagatgcaaagagatgtgtcatcctggtgaatgtccctttaactgcaaccagaaggtaaaacttagatgtccttgtaaaagaataaaaaaggaattgcagtgcaacaaagtacgtgaaaatcaggtttcaatagaatgtgacacaacgtgcaaggaaatgaagcggaaagcatctgagataaaagaagcagaagccaaagctgctcttgaagaagaaaaacgaagacaacaggctgaactagaagcttttgaaaacagactgaagaccaaccacattggccacacaggctatctgaacacggtgactgtctctccagatggatccctctgtgcttctggaggcaaggatggccaggccatgttatgggatctcaacgaaggcaaacacctttacacgctagatggtggggacatcatcaacgccctgtgcttcagccctaaccgctactggctgtgtgctgccacaggccccagcatcaagatctgggatttagagggaaagatcattgtagatgaactgaagcaagaagttatcagtaccagcagcaaggcagaaccaccccagtgcacctccctggcctggtctgctgatggccagactctgtttgctggctacacggacaacctggtgcgagtgtggcaggtgaccattggcacacgctagaagtttatggcagagctttac

SEQ ID NO: 4534 - DNA, 3792 bp, Homo sapiens
tcgggccgcggtcgcggctttgcggcaggccgcgccccgcctcgccccgcagcccggccggccgggagggatgcgctgtgccgcccagctcctctccgtcctgcccatgccctgaagcagaaagtttgggggccgggggttgtctcccttctccctcctgcaatgactgcccaaggactcttgctgcccagcctcgactgtgacctgtcttcgctccccaggtcgaaatgaactattccaagctataaccaaggctcccccttctcgcccctccctcacccgcctttaagaattttttttttaattcaagaaattgtggtctgccatctcccctccttgttaataatttagaccccaggcctcatatgaatataagagggggtgcggtcttccccaagacggcgcgctggaaggacagattccccttgccgacccacatacaccatgaagaggtgcagatcggacgagctgcagcaacaacagggcgaggaggatggagctgggctggaagatgccgcttcccacctgccgggcgcggacctccggcctggggagaccacgggtgctaactctgctggcgggccaacttcagacgccggcgctgccgcggcgcccaacccaggtccccgaagcaagcctcctgatttaaagaaaatccagcagctgtcagagggctccatgtttggccacggtctgaagcacctgttccacagccgccgtcggtctcgggaaagggagcaccagacgtctcaggattcccagcagcatcagcagcagcagggtatgtccgaccatgactccccagatgagaaggagcgctctccggagatgcatcgcgtctcctacgccatgtccctgcacgacctgcccgcccggcccaccgccttcaaccgcgtgctgcagcagatccgctcccggccctccatcaagcggggcgccagcctgcacagcagcagtgggggcggcagcagcgggagcagcagccggcgcaccaagagtagctccctggagccccagcgtggcagccctcacctgctgcgcaaggccccccaggacagcagcctggccgccatcctgcaccagcaccagtgccgtccccgctcttcctccaccaccgacactgctctgctgctggccgacggcagcaacgtgtacctcctggctgaggaggccgaaggcatcggggacaaggtcgataagggagacctggtggccctgagcctccccgccggccatggtgacaccgacggccccatcagcctggacgtgcccgatggggcaccggacccccagcggaccaaggccgccattgaccacctgcaccagaagatcctgaagatcaccgagcagatcaagattgagcaggaggctcgcgacgacaatgtggcagagtatctgaaactggccaacaacgcggacaagcagcaggtgtcacgcatcaagcaagtgttcgagaagaagaaccagaagtcagcccagaccatcgcccagctgcacaagaagctggagcactaccgccggcgcctgaaggagattgagcagaacgggccctcgcggcagcccaaggacgtgctgcgggacatgcagcaggggctgaaggacgtgggcgccaacgtgcgcgcaggcatcagcggctttgggggcggcgtggtggagggcgtcaagggcagcctctctggcctctcacaggccacccacaccgccgtggtgtccaagccccgggagtttgccagcctcatccgcaacaagtttggcagtgctgacaacatcgcccacctgaaggaccccctggaagatgggccccctgaggaggcagcccgggcactgagcggcagtgccacactcgtctccagccccaagtatggcagcgatgatgagtgctccagcgccagcgccagctcagccggggcaggcagcaactctggggctgggcctggtggggcgctggggagccctaagtccaatgcactgtatggtgctcctggaaacctggatgctctgctggaagagctacgggagatcaaggagggacagtctcacctggaggactccatggaagacctgaagactcagctgcagagggactacacctacatgacccagtgcctgcaggaggagcgctacaggtacgagcggctggaggagcagctcaacgacctgactgagcttcatcagaacgagatgacgaacctgaagcaggagctggccagcatggaggagaaggtggcctaccagtcctatgagagggcacgggacatccaggaggccgtggagtcctgcctgacccgggtcaccaagctggagctgcagcagcaacagcagcaggtggtacagctggagggcgtggagaatgccaacgcgcgggcgctgctgggcaagttcatcaacgtgatcctggcgctcatggccgtgctgctggtgttcgtgtccaccatcgccaacttcatcacgcccctcatgaagacacgcctgcgcatcaccagcaccaccctcctggtcctcgtcctgttcctcctctggaagcactgggactccctcacctacctcctggagcacgtgttgctgcccagctgagtggccagccacaccaaccctgtgctctctggcccccagctggccacacttctccaggagggacccttggacttctttgtgtgtccagtttggcctcctgcccaaactgtccattccagcagctcctgcccccttctctgtacttgcttctgtctgacaccttctccctgttggcctgaagggagcttagaatgcagccctacctggagatagtgcgggcacctgtggccaagtggagcagaggtggacatggggttggattgttttgattatttatagttacacaaggacttctcccagctgaccctcaggatgccccaagtcaggaagaccattaagaataggaggagagggctctgcctcaactttcctaggaaagagcccacctcggagatagctacggtttcctctggtggagatggtgaggatgaaggctggagagtgagggaggaggctctgctggccgcagagaacacagggatgggagggtccctagccttcgggcacctccagggccagagagcaggctcagagcagctagtgtggagctcagcatccccaccccacccctcctccctgtagagctgatttgaggcctccttctggggctgggctctgcaggccaggtgggtgtggcctgtgttttcccttctgttctttctgcctgtactggatctgttattttcagggaaacaggccccagggcccccctgagcctcaccctaagcccttaggcctctgagagtgctgttgggttctatttatttatttatttgttcctttgttccctacccgtgcccccagtgtcttccctgctgagtaccaggagaggtcctgccccatcctctctctgaagccagggcccttccattccatttagcctttggatcatcctggctgggagaagtgggaccgagccacccagccccactatccccaagcagccctacagccgggatgggaggcacgtggcctctcttttatccgtctatttattttgtaagtgtattcgtgtggaggaggttgttgctttatttttttaaggctctggagtgttgtgtatggtttcttttcacatcccagcctcccatgggcacttctaagaagagaggggatttcttggaaaaggagagaggaatcccctagagcagggaaagcagtgcctgccagctgttgtgcaccttcctgagaaataaatatcctctaaattttcaaacc

SEQ ID NO: 4535 - DNA, 4580 bp, Homo sapiens
ctttgtctctcccggcatctggagcaaggaaaaaaaccctcgactatgcagagacatgtgatggtagccaacccctcagttttgtgttctcattttaaccaagacctttggccagagcagagcataaaagattctttccaaaaactgatactgagaaggcataaaaaatgtggacatgataatttgcagttaaaaaaaggctgtgaaagtgtggataagtgtaaagtgcacaaaagaggttataatggacttaaccaatgtttgacaactacccaaagcaaaatgtttcaatgtgataaacatgggaaagtctttcatcaattttcaaatacaaacagacataagataagacatactggaaaaaacccttgcaaatttacagaatgtggcaaagcttttaaccggtcctcaacctttactacacataagaaaattcatactggagagaaaccctataaatgtatagaatgtggcaaagccttcaaccggtcctcacaccttactacacataagataattcatactggagagaaacggtacaaatgtgaagactgtggcaaagcctttaaccgctcctctaaccttactacacataagaaaattcatactggagagaaaccctacaaatgtgaagaatgtggcaaggcctttaagcgctcctctatccttactacacataagagaattcatactggagagaaaccctacaaatgtgaagaatgtggcaaagtttttaagtacctttcttccctttctacacataagataattcatactggagagaaaccctacaaatgtgaagaatgtggtaaagccttcaactggtcctcacaccttactacacataagagaattcatactggagagaaaccctacaaatgtgaagaatgtggcaaaggctttaagtactcctctacccttactaaacataaaataatccatactggagagaaaccctacaaatgtgaagaatgcagaagcctcaggagccaatgcgatcaactggaagaaagggtatcagtgatggaagatgaaatgaatggaatgaagtgagaagggaagtttagagaaaaaaaattaaaaagaaacaaagtctccaagaaatatgggactatgtgaaaagaccaaatctacctctgattggtgtacctgaaagtgagggggagaatggaaccaacttggaaaacactctgcaggatattatccaggagaacttccccaatctagcaaggcaggccaacattcagattcaggaaatacagagaacgccacaaagatactccttgagaagagcaactccaagacacgtaattgtcagattcaccaaagttgaaatgaaggaaaaaatgttaagggcagccagagagaaaggtcgggttacccacaaagggaagcccatcagactcacagctgacctcttggcagaaactctataagccagaagagagtggggaccaatattcaacattcttaaagaaaagaattttcaacccagaatttcatatccagccaaactaagcttcataagtgaaggagaaataaaatactttacagacaagcaaatgctgagagattttgtcaccaccaggcctgccctaaaagagctcctgaaggaagcactaaacatggaaaggaacaactgataccagccgctgcaaaatcatgccaaaatgtaaagaccatcgagactaggaagaaactgcatgaactaacgagcaaaataaccagctaacatcataatgacaggatcaaattctcacataacaatattagctttaaatgtaaatgggctaaatgctccaattaaaagacacagacaggcaaattggataaagagtcaagacccatcagggtgctgtattcaggaaacccatctcacgtgcagagacacacataggctcaaaataaaaggatggaggaagatctacgaagcaaatggaaaacaaacaaaaaaagaggcaggggttgcaatcctagtctctgataaaacagaatttaaaccaacaaagatcaaaagagacaaggccattacataatggtaaatggatcaatccaacaagaagagataactatcctaaatatatatgcacccaatacaggagcacccagattcataaagcaagtcctgagtgacttacaaagagacttacactcccacacaataataatgggagacttaaacaccccactgtcaacattagatcaatgagacagaaagttaacaaggatatccaggaattgaacacagctctgcaccaagcggacctaatagacatctacagaactctccaccccaaattaacagaatatacatttttttcagcaccacaccacacctattccaaaattgaccacatagttggaagtaaagcactcctcagcaaatgtaaaggaacaaaaattataacaaactgtctctcagaccacagtgcaatcaaactagaactcaggattaagaaactcactcaaaaccgctcaactacatggaaactgaacaacctgctcctgaatgactactgggtacataacgaaatgaaggcaggaataaagatgttctttgaaacccatgagaacaaggacacaacataccagaatctctgggacacattcaaagcagtgtgtagagggaaatttatagcactaaatgcccacaagagaaagcaggaaagatccaaaattaacaccctaacatcacaattaaaagaactagaattgcaagagcaaacacagtcaaaaactagcagaaggcaagaaataactaaaatcagcagaactcaaggaaatagagacacaaaaaacccttcaaaaaattaatgtatccaggagctggttttttgaaaggatcaacaaaattgatagaccgctagcaagactaatgaagaaaagagagaagaatcaaatagatgcaataaaaagtgataaagggaatatcatcactgatcccacagaaatacaaactaccatcagagaatactacaaacacctctatgcaaataaactagaaaatctagaagaaatggataaattcctcaacacgtacaccctcccaagactaaaccaggaagaagttgaatctctgaatagacaaataacagcctctggggttgaggtgataatcaatagcttaccaaccaaaaagagtccaggaccagatggattcacagccgaattctaccagaggtacaaggaggagctggtactattccttctgaaactattccaatcaataggaaaagagggaatcctccctaactcattttatgaggccagcatcttcctgttaccaaagctgggcagagacaaaaccaaaaaagagaattttagaccaatatccttgatgaacattgatgtgaaaatcctcaataaaatactggcaaaccgaatccagcagcacatcaaaaagcctatccaccatgatcaagtgggcttcatccctgggatgcaaggctggttcaacatacgcaaatcaataaatgtaatccagcatataaacagaaccaaagacagaaaccacatgattatctcaatagaattctctctggaggagtggcattgcctggacatggcacagcggaatttatatagggatgtgatgttagagaactacagaaacctggtctttcttggtattgttgtctcaaagccagacctcatcacccatctggagcaaggaaaaaaaccactgcttaacgaaataaaagaggatgcaaagaaatggaagaacattccatgctcatgggtaggaagaatcaatatcatgaaaatggcccatactgcccaaggtaatttatagattcaatgccatccccatcaagctaccaatgactttcttcacagaattgaaaaacactactttaaagttcatatggaaccaaaaaagagcccacattgccaagtcaatcctaagccaaatgaataaagccggaggcatcacgctacctgacttcaaactatgctacaaggctacataaccaaaatagcatggtactggtaccaaaacagagatatagatcaatagaacagaacagagccctcagaaataatgccacatatctacagctatctgacctttgacaaacctgacaaaaacaagcaatggggaaaggattccctatttaataaatggtgctgggaaaactgtctagccataagtagaaagctgaaactggatcccttccttacaccttatacaaaaattaattcaagatggattaaagacttacatgttagacctaaaaccataaaaaccctagaagaaaacctaggcaataccattcaggacataggcatgggcaaggacttcatgtctaaaacaccaaaagcaatggcaacaaaagccaaaattgacaaatgggatctaattaaactaaagaccttttgcacagcaaaagaaactaccatcagagtcaacaggcaacctacaaaatgggagaaaattttcgcaacctactcatctgacaaagggctaatatccagaatctacaatgaactcaaacaaatttacaggaacaaacaaccccatcaaaaagtcggcaaaggacatgaacagacacttctcaaaagaagacatttatgcagcc

SEQ ID NO: 4536 - DNA, 3063 bp, Homo sapiens
attatttttttgccccagtctgcagggtgaaaaggacttttcatttcactgaggtgaaaagtgggtctgtgagtagagcgactttctttaaaaaaaaaaaaaaaaatcagaaaccaattacttgatatgcagagctgcaagcctcgttcctttaacaaaatcagtgcagtgtgcactgccgttaacctgaggaaagcagctgacatctcttgattacggctagaggtggaaggacccaaacttgcagcctccccctccccctcgagagagtgttagtccagtcctttagagaggttcggtttggctctctgtcatcaccgggacgctggcagggagtgtgtgtcatggttacaatagagtgtgctaacatataacaaccatgaaagcccagcgggaaaggctacagattccggggctgaccttggatctcactcccaggagcctgagtccaaccccatccagcccaggcagtccttgtagtcctctcttggcctttcacttttggagttgccgaacaagcaaccggaaaagcttaataggcaatgggcagtcaccagcattgcctcgaccacactcacctctctctgctcatgcaggaaatagccctcaagatagtccaagaaatttctcccccagtgcctcagcccatttttcatttgcacggagaaatgacaggactgatggacgccgctggtcgttggcttctctcccttcctctggctatgggacaaacacacccagctctacggtctcttcatcctgttcctcccaggagaagttgcatcagttaccataccaaccaacaccagacgagttacacttcttatcaaaacatttctgtaccaccgaaagcatcgccactgagaacagatgcaggaacacgccgatgcacccccgttcccgaagtctgagccctggacgttctcccgcctgctgtgaccatgaaataattatgatgaaccatgtctacaaagaaaggttcccaaaggctacagctcagatggaagaacgtctaaaggaaattatcaccagctactctcctgacaacgttctacccttagcagatggagtgcttagtttcactcaccaccagattattgaactggctcgagattgcttggataaatcccaccagggcctcatcacctcacgatacttccttgaattacagcacaaattagataagttgctacaggaggctcatgatcgttcagaaagtggagaattggcatttattaaacaactagttcgaaagatcctaattgttattgcccgccctgctcggttattagagtgcctggaatttgatccggaagaattttactacctattggaagcagcagaaggccatgccaaagaaggacagggtattaaaaccgacattcccaggtacatcattagccaactgggactcaataaggatcccttggaagaaatggctcatttgggaaactacgatagtgggacagcagaaacaccagaaacagatgaatcagtgagtagctctaatgcctccctgaaacttcgaaggaaacctcgggaaagtgattttgaaacgattaaattgattagcaatggagcctatggggcagtctactttgttcggcataaagaatcccggcagaggtttgccatgaagaagattaataaacagaacctcatccttcgaaaccagatccagcaggcctttgtggagcgggatatcctgacttttgcagaaaacccctttgttgtcagcatgtattgctcctttgaaacaaggcgccacttgtgcatggtcatggaatatgtggaagggggagactgtgctactttaatgaaaaacacgggtcctctccctgttgatatggccagaatgtactttgctgagacggtcttggccttggaatttacataattatggaattgtacacagggatttgaaaccagacaacttgttggttacctccatggggcacataaagctgacagattttggattatctaaggtgggactaatgagcatgactaccaacctttacgagggtcatattgagaaggatgctagagagttcctggataaacaggtctgtggcacacctgaatacattgcaccagaagtgattctgaggcagggttatggaaagccggtggactggtgggccatggggattatcctctatgaatttctggttggatgcgtgccattctttggggatactccagaggagctatttggacaagtcatcagtgatgagatcaactggcctgagaaggatgaggcacccccacctgatgcccaggatctgattaccttactcctcaggcagaatcccctggagaggctgggaacaggtggtgcatatgaagtcaaacagcatcgattcttccgttctttagactggaacagtttgctgagacagaaggcagaatttattccccaactggaatctgaggatgacacaagttattttgatactcggtctgagaagtatcatcatatggaaacggaggaagaagatgacacaaatgatgaagactttaatgtggaaataaggcagttttcttcatgttcacacaggttttcaaaagttttcagcagtatagatcgaatcactcagaattcagcagaagagaaggaagactctgtggacaaaaccaaaagcaccaccttgccatccacagaaacactgagctggagttcagaatattctgaaatgcaacagctatcaacatccaactcttcagatactgaaagcaacagacataaactcagttctggcctacttcccaaactggctatttcaacagagggagagcaagatgaagctgcctcctgccctggagacccccatgaggagccaggaaagccagcccttcctcctgaagagtgtgcccaggaggagcctgaggtcaccaccccagccagcaccatcagcagctccaccctgtcagttggcagtttttcagagcacttggatcagataaatggacgaagcgagtgtgtggacagtacagataattcctcaaagccatccagtgaacccgcttctcacatggctcggcagcgattagaaagcacag

SEQ ID NO: 4537 - DNA, 3571 bp, Homo sapiens
gtggagaagtctatcaacgatgcttcctcaatttcaacatcccaaagaatttcttgtaggcccaaaacccatatttctaataactatgggaataatttccggaattcttcgttactcacacaaaaacaggaggtacacatgagagaaaagtctttccaatgtaatgagagtggcaaagcctttaattatagctcactcttaaggaaacatcaaataatccatttaggagagaaacaatataaatgtgatgtatgtggcaaggtctttaatcggaagcgaaacctagtgtgccatcgtagatgtcacactggggagaaaccttacaggtgtaatgagtgtggcaagactttcagtcagacgtattcccttacatgccatcgtagacttcatactggagagaaaccttacaaatgtgaagaatgtgacaaagctttcagtttcaaatcaaaccttaaaagacataggagaattcatgctggagaaaaaccatacaagtgtaatgaatgtggcaagacctttagtcagacgtcatcccttacatgccatcgtagacttcatactggagagaaacctttcaagtgtaatgagtgtggcaagacctttagtcggaagtcatcccttacatgccatcatagacttcatacgggagagaaaccttataagtgtaatgaatgtggcaagaccttcagtcaggagttaacccttaaatgccatcgtagacttcataccggagagaagccttacaagtgtaatgaatgtggcaaggtttttaataaaaaggcaaaccttgcacgtcatcatagacttcatagtggagagaaaccctacaagtgtactgagtgtgtcaagacgttcagtcgaaattcagcccttgtaattcataaggctattcatattggagagaaacgttacaagtgtaatgagtgtggcaagacgttcagtcgaatttcagccctcgtaattcatacggcaattcatactggagagaaaccttacaagtgtaatgaatgtggcaagggttttaatcgaaaaacacaccttgcatgtcatcatagacttcatactggagagaaaccttacaagtgtaatgaatgtggcaaggtttttaatcgaaaaacacaccttgcacatcatcatagacttcatactggagataaaccttacaagtgtaatgaatgtggcaaggtttttaatcaaaaagcacaccttgcacgtcaccatagacttcatactggagagaaaccttacaagtgtaatgaatgtggcaaggtttttaatcaaaaagcaaaccttgcacgtcatcatagacttcatactggagagaaaccttacaagtttaatgagtgtggcaaagcttttaattgaaaagcaaagcttgcacatcatcatacaattcatactggaaagaaacaagtgcaatgagtgtggcaagaccttctgtcacaattcagtccttgtaattcataagaattcatactggagagaaacaagtgtaatgaacgttgcaaaatttttaatcaacaagcacaccttccacgtcatcatagacttcatagtggagagaaaccttagaaatgtgaagcatgtgacaaagtttacagtggcaaatcgagcctcaaaagacaggagaattcatactggagagaaagcttacaaaggtgaagaatatcacagagttttcagtcacaagtcaaaccttgaaagacataaaataaatcatactgcagagaaaccataaaattgtaagagttcgtgacaaggctttcgggcatgactcacacctggcacaacatcctagaattcatactggagagaaaccttacaagtgtaatgagtccggcaaagccttaatgagcagtcaacacttactcaccatcaggcaatccatggtgaaggaaacttgactaatgtaatgattgtcaccaagtcttcagtaacgctacaaccattgcaaatcattggagaacccataaggaagagagatcatacaagtgtaataatcggcaaatttttcagacatcgtccataccttgcagttcattggcgaactcatactggagacaaaccttataaatgtcatgattgaggcaaggtcttcagtcaagcttcatcctatgcaaaacataggagaattcatacaggagagaaacctcacgtgtgatgattgtggcaaagcctttacttcacgttcacacctccttagacatcagagaatgcacactggacggaaatcttacaaatgtcatcagtgtggcaaggttttcagtctgacttcactccttgcagaatatcagaaaattcattttgagataattgttccaaatgcaatgagtagagcaaaccatcaagcagtaattgacattaaagtgtttatgttaagaggattgggccaggtacagtgtctcacacctgtaatcccagcactttgggaggccaaggcgggtagatcacttgaggtcaggagtttcagatcagtctggccaacaaacatgagccacttttcccagtttgctttttgttctttaacaaaaactgatagggatttttatgggtaccgtgttgaatctaaatcacattgggttatataatcatttaacaatattaatttttccaatccatcaatatgggttatatgtctgtatatgtttttaatcatattgatgtatatttgtagatttcaaggtacaaacttctcacctttttacttttatttctatttctttaagttctctagcaaatggaagtgtttttaaattttcttttaaaattgtttattgttacaaacttctcatctttttgcttttattcctaagtatttcttactttaagttctctagcaaatggaagtgtttttaaattttcttttaaaattgtttattgttaatgtatggaaattcagctaatttttggtgctgatattgtactgtgcagatacactgaatctgtttattacttccagtagtattttggttgagtctttgtgattttctacacagaagatcatgtcatctacaaacacatataattttacttctttctttctgatttggatgggtttgattttttttgctatttcattgctctggctaggacagccagtatttattgaatagaaggggtgagagcattcttccatcacgtgagatcctacaggaaaatcattccatgttccctgcttcgttatctactcgttggtcatttcatggatggcctttctattgttgaggtaaatttccttttctgtctattttgttcagaatttctatgatgagtggattttgaattttgtgaaatactttttctccatctattgagatgatgtggttttcatctttcattctgttcaagtggcatatcacattgatttgcttgactatgttgaaccatccttgcatcccagaaataagtggcacttgagtatctacagtcctttttacatcctcttgaatacagctttttagtacaaggggtcttcaagaagttcatggaaaaatacatattttgcatattatgagaaaattgtgtatgaatttcccagtttttgcaccaaaataaactggtacgaatctgt

SEQ ID NO: 4538 - DNA, 4066 bp, Homo sapiens
tgttcgtgtcttctaataagagcaagccgatcattaaccttctcaacgcagcgtcttttggtttcttccatttccaaccagcagaatatcttcttggaactttcttttttaacctctgccttcctcacgcacctattttttggagggttccttttccctgctctctacctcctgtttaaattgaaacctgtacactttaagctttttgctcatcgcttggttttgctcttttatgccttaaattatctttgcggcatttttgactcatctgctggggaagaccattccctcaagaaaacttccaacagcaactcaaagcaaactaagatgaaaaaatggggggaaagaatctgtccactgggaacgctttacgtcaccgtgttgctctggaagacagagactgctctgggcacctggcgaggcggctctgcagtgcaggctggggccggtccctgcggcctgctgggctctggcctcgtttggcccatcactcatgctgccgtctcaagcacaagggttgctgtggtgggttttccctctgtttcctgcttcctcactgtcctacccacctgtttcctacagggcagatggcctggcccgtaacactttcctgaaggcatgcagtgaaagcagcagcagtagcaacatctccaccatgttggtgacacacgattacacggcagtgaaggaggatgagatcaacgtctaccaaggagaggtcgttcaaattctggccagcaaccagcagaacatgtttctggtgttccgagccgccactgaccagtgccccgcagctgagggctggattccaggctttgtcctgggccacaccagtgcagtcatcgtggagaacccggacgggactctcaagaagtcaacatcttggcacacagcactccgtttaaggaaaaaatctgagaaaaaagataaagacggcaaaagggaaggcaagttagagaacggttatcggaagtcacgggaaggactcagcaacaaggtatctgtgaagcttctcaatcccaactacatttatgacgttcccccagaattcgtcattccattgagtgaggtcacgtgtgagacaggggagaccgttgttcttagatgtcgagtctgtggccgccccaaagcctcaattacctggaagggccctgaacacaacaccttgaacaacgatggtcactacagcatctcctacagtgacctgggagaggccacgctgaagattgtgggcgtgaccacggaagatgacggcatctacacgtgcatcgctgtcaatgacatgggttcagcctcatcatcggccagcctgagggtcctaggtccagggatggatgggatcatggtgacctggaaagacaactttgactccttctacagtgaagtggctgagcttggcaggggcagattctctgtcgttaagaaatgtgatcagaaaggaaccaagcgagcagtggccactaagtttgtgaacaagaagttgatgaagcgcgaccaggtcacccatgagcttggcatcctgcagagcctccagcaccccctgcttgtcggcctcctcgacacctttgagacccccaccagctacatcctggtcttagaaatggctgaccagggtcgcctcctggactgcgtggtgcgatggggaagcctcactgaagggaagatcagggcgcacctgggggaggttctggaagctgtccggtacctgcacaactgcaggatagcacacctggacctaaagcctgagaatatcctggtggatgagagtttagccaagccaaccatcaaactggctgactttggagatgctgttcagctcaacacgacctactacatccaccagttactggggaaccctgaattcgcagcccctgaaatcatcctcgggaaccctgtctccctgacctcggatacgtggagtgttggagtgctcacatacgtacttcttagtggcgtgtcccccttcctggatgacagtgtggaagagacctgcctgaacatttgccgcttagactttagcttcccagatgactactttaaaggagtgagccagaaggccaaggagttcgtgtgcttcctcctgcaggaggaccccgccaagcgtccctcggctgcgctggccctccaggagcagtggctgcaggccggcaacggcagaagcacgggcgtcctcgacacgtccagactgacttccttcattgagcggcgcaaacaccagaatgatgttcgacctatccgtagcattaaaaactttctgcagagcaggcttctgcctagagtttgacctatccagaagttctttctcattctctttcacctgccaatcagctgttaatctgaattttcaagagaaaacaagcaaacataactgatcagctgccggtatgttcatcgtgtgaaattgcattccaagtgagctgtgctcagcagtgcttggacacagagctgcaagctgcgctggggtggaggaccgtcacttacactctgcccaaggcagaggtcgcattgctgtatcacagtattttattcaggtttctgcaaaaaaataaaaagataacttttttaaacaaacatgaatagaattttgcaaatttaacgttttcaagatttattcaaggaaacaaaatgcctatgttcaaccactggtgttaatgaacaaagatactgtgcgtctctggggaagacgcacctaggtggcggccactcccatggccttgtctaggactcagagaccactcggctctgagcttccaggcgcctcgtctgtgtgcatctcacgcccgacgtggcttctgaaacgtgcattcaacctcaaacttttgcataaaatagaatgaatcgttttgctctgatgaaatgtaggccttacttgtatataagactgttcctgccttcggtctgtcattttcccacctgcctcccctacccaccccccacccaccacctggggcttcctctgggggtccgagggtcttcccatcacatgaagacatcaggttgggtcctgccccactgcccctccccctgttcctgccccaagccgtcaatcagattgtggagcagtacacagtcagatgaaaatactgtaaatgcactcattgggggtttttttggttttacttcatatcatgtgcaatgttgtggctttaacattttatgcaactatttatgaagacctctgttgtacctgtaataaatatatagaaaaagcacatacttcgtatggtgagctttatggttttgtgtgtgtgttggggttggcgggtgggtgggtagggtcgtagccctgtgccatcggttcaaagagacttttcgtgaaatttgttggttttgaggactgtaaaagtgatttcatactctgaatataaaactggataatagggtaatgttttaaaatttattatgctattattcagaatgccaaagtattattttttttcccaaaatcagtctggacatttactactttttagactttttgacgttgaactttctgtataaaaattggctgggttttgagcttttggtaagaaataaaagccgattaagcactggccgccccgcggctggtacccaatgcccgagtcactgtggcagcattcgcactggtgtggggagtcctttcaactcaaggaggctgggtttctgggcaccctcgaagttttctggatgtctttttatctttctcgtgtgaactgcactacaaaagagaccagcccgcttcccaagccagccagacacctgggtcttgagccataaactggcgtagttaagctttgcagcttccagtgtattttatttattcttttgttgggtttttgtttgtttcttcttgtaaaattgtacagaaactttttaaaagaaattggattcgaaactggatgtgtattcgtaacctcataatttttatttgtgtattgtttcttttattatttcagttaaatttttacattattttgcatgtatatttctttgtacagagaccttacatgtttacacagtatgatgtgatgtaaatattttattttgccatcagttattttaaaaaattaaacatatttgcctg

SEQ ID NO: 4539 - DNA, 3398 bp, Homo sapiens
tcgcttttcgctcggcattgcggccagccagccgggcactcggggggcacgcgcggccaccgctagagctctgcccccaccccacccgccagcaggtctggggtggggacccaggtgggggctcctgcagccactgcccggtgcggaccgcacggagcgacccactcctcccagcaccgaggaagaagcaacggagccctcagcgggcgaccggcctccccgcccctgaccacccgcttcccggctgcctttgtggccgcagcttctcgccgccgagccgagggccggcgggggcgcggcgcgcacggccgagcgatgcccagctcgctgttcgcagacctggagcgcaacggcagcggcggcggcggcggcggcagcagcggagggggagagaccctggatgaccaaagagccctgcagctcgcgctcgaccagctctccctgctggggctggacagtgacgagggcgcctctctgtacgacagcgagccgcgcaagaagagcgtgaacatgaccgagtgcgtgccagtacccagttctgagcatgtcgccgagatcgtggggcggcaaggttgtaaaatcaaagcgctgcgggcgaagaccaatacttacatcaagaccccagttcgcggggaggagcctgtctttgttgtgacgggcaggaaggaggatgtggccatggctcggagggagatcatctctgctgccgagcacttctccatgatccgcgcctcccggaataagaacacggcactcaacggcgcggtgcctgggccgcccaacctgcccgggcagaccaccatccaagtgcgggtaccctaccgcgtggtggggctcgtggtggggcccaaaggcgccacaatcaagcgcatccagcagcagacgcacacgtacatcgtgacgcccagccgggataaggagccggtgttcgaggtgaccggcatgccagagaacgtggatcgcgctcgagaggagattgaggcgcacattgctctgcgtaccggcggcatcattgagctcacagacgagaacgacttccacgccaacggcaccgatgtgggcttcgatctgcatcatgggtccggcgggtccggcccaggcagcctctggagcaagcccacccccagcatcacgcccacccccggccgcaagcctttctctagctaccgcaacgacagctccagctcgcttggcagtgcttccacagactcttatttcggcggcgggaccagcagcagcgcagcggctacccagcgcctggcggactacagcccccctagccccgccctgagctttgcgcacaacggaaacaataacaataacggcaatgggtacacctacacagcggggggagaagcctcagtgccatcccccgacggctgccccgagctgcagcccacttttgacccggctcccgctcccccacctggggcaccacttatctgggcccagttcgagcggtccccgggaggcggacctgcagctccggtatcttcttcctgctcttcttctgcatcttcgtctgcttcttcctcctccgtggtcttccccgggggtggcgccagtgcgccctccaacgccaacctggggctattggtgcaccgccggctgcaccctggcaccagctgcccgcgcctgtctccacccttgcacatggccccgggggcgggagagcaccacctggctcgccgggtgcgcagcgacccgggtggaggaggcctggcctacgccgcttatgccaacgggctgggggcacagctgcctggcttgcagccgtcggacacgtcgggctcctcctcttcgtccagctcctcctccagctcttcatcctcttcctccgggcttcggcgtaaaggcagccgcgactgctccgtgtgcttcgagagcgaagtgattgccgcgctggtgccctgtggccacaacctcttctgcatggagtgcgccaatcgcatctgtgagaagagcgagcccgagtgcccggtctgccacaccgcggtcactcaggccatccgcatcttttcttaaaggcagcgggcgctgctagtgcgcaccgtgctgggggaagggggaacccctccccatcctctttccccagcgctcgcctgcctccctgggtgccccccctctcccttctccttcccggccccaccaacactctgagatccgagaggagcttggaaagctgtagtatccgctcatttttaaaatttaatttttaagtaaaggaatttgccaggatatctgcatcaagagtactgtagcctgggaaacctgaacacctgaaatgcatgctctataaataataggaacggcgacattctagtaatgatagtttttacactgtacttaataggaagcttccaaaagaagaaaaccccacaagttttccattttcttaaagtaggaaaaaatgaacagtaataattatgatgaagatgatagtagtgctatgggatgtgtggactgtttagtgtgttcccctttgtgggtgggttcctatgatacttattatagaacacagtggatcctttttgaatgttcgtggaagggccaggagttcctgtgaaaccaggatactgcagctttattaaagttaaagaaactgtaacatatctcttatatattaaaaacgtttaaaagttttagagagaaattgcattaatacagattgaagtattttattcttttttgacttgaaaaattatatttcatattgcaaagatgtttacaagtattttaatttaagttcagtgaacttttttgtagctgggttaaatctttttattttagtatggccttatggcaaagaacactgtattattttaataatcacacaattgtgacggaattacaaccataaaatgtgtaatgttttgaacagtattctgttgggatggagattttataggttcagacaaatcttctagatctgcttcacccagcatattttctattcagtgatataaagcatattttattctatattattacaaaaacggaaatgtataaacatgtcaaaaagaactgttgatgctttctaacatttgtataaatagaattcagtgcaagttacaaaaattctgttgcaccactctagttttagtatttctattttaatacatttgtttaccacttgtttatgtatatgtaggtgatgttacttgagcttaaatgtactttactgagcaaagtttaaaaaacaaagtatattttattttatgataaagggcctttaacctcatggtcaaatactaatattatatttgctgagacaagatttgaaattgtatcaagagttttatttttctgacatttaaagttctacataataaaggtaaaacttaagtaatggtgctacttcattttttaagtatttctatataaataaaatattgaag

SEQ ID NO: 4540 - DNA, 3858 bp, Homo sapiens
agagctcctgggccgtctttccctgagaatgaagccaacacaggcaggattgagcttagagtctgaattagatggtgcctagtgaccgcctctgaactcctggacccagctacacctgaagccactctaccccacattttctaggcaagtcaacctgcaaacgcccttcttttctgaaatgagcttgggttgggattctgtcacttcaaccaaaaggaccccagccatgcaatgttgcaatatcgaagtaggatggtctaggctttatgagtggcagaccgaggcggggcaggaagatggaggctttctggctcccaacaggtggaagaggggagtctccggggtggccagatacatctacagactcacttgcccctgggctgttctccaaaaccgccgtggaggtgggactccgacccatctgagcctcttcctgacctggaccacctgggacagctgtgtttacagcatctgggcccttgagcgtgagtgtcccacctccccgtaggatcaggcccctgggaaggcaggggccgattctctttcttccctctgtggcagtccccccatcccatcacagagcgccatagacgacaagctgtggccgtcggtctgggggttcgagcccccaggccccactccacccactccgaggattggcttggtggggccggtgctggctcccagaggctgcagggctctggaaggaaaggccttctgcagagcagggcccctgtagcctggccgcctgaccagcctgtggggagggaggcggcggtgggaagccccttgctctgctggcgcctctcccaacgcccagggcctctttacccagcatttctctgccgctgtgactgtgcctagacctcgagctcagagaaaaggctgttgctgccggctcagctgaaaccgcctggtgctttctatagaatctttgtgaggagctattatagaagggactgttatcaaagaattaattacggaaactaaggactgcacaaaaataattatttccaaacaatgagtgtacagccctgagaattccagtgggagtggtggcgatctacccgggtctgtgggcctagcctggggtcaccgtacgtcgtggcctgtctcccttcttctccggatcccccaccccaggccacgtgcctcaagggacatctgggatggaggaagccaagggtcaggctgaatccttcctcgccaaacatggacacgatgcctggcacccccactgagagtggtctgtggtcctctccggtgatcactacagtgtctctgagatatcattgtccccatttcccagatgggaaaaccgaggctccaaatggctaagaaacatgcccaagtgtctgaacctgcaggcagcgggctggggctcaggcctcggtctgtgtggcctccttagtcagtggggagtgggtgtgagggaagcccaggtgacactggcccagcaggacacacaggacagcaggtgcagaggaacccgcaccgagggaccccacccacaggcagcagtggcatctgcggcagggagatttacctctgtgctccccgcactgtcccatgagttgtccaaggactgggacctggggttgggagggacacacagcagccgttggctgtgttgccatgacacgacagaggttccagccactagcacaggccgcctgtcctggggagacagtcctatttgtaacatctatctcagcctgaatcggggagacagtcctgtttgtgacatctgtctcagcttgaatcggggagacagtcctgtttgtgacatctgtctcagcctgaattggagaaggtttcccacagcagaagcagacccagagcaagggcatccctgattcgggaggaagctggcgtgccgaaggtcaccagcaggcactgtggacccagcctttgagcttggaccccgcctggcccacaaagccccgtgctgcttcccagggcccacgcgcaggttcccggacctccagctgcaccctggagggggtgaggggggctcactgtgtggcgtgtgccaggtggaggggctggcgtgggacagagggatggagctcgggggaagaccagcagatccctggacacacggggtgaggctgggctgtctcagataggcaggactaaaagcaagacaagcaagacagaagggctcaagactggagcagccaggaaattctgtccaagccgagtccctgggtttgcgagacttcacgccacctcacaggggtcgtctggggttgtggtctctggccaggagggtgcgggagcctctttcttccagctcagctcgtgctacaccagaaagggaagggcaagagcaccccctcaacccagaggacccccagatcaagagaccacccaggctacaatcaactctgatggcgcttttaatcaccccagcaggagtggcgactgtaaacagacattcaacaattcccagtgacacacatacctcccgggaaaaaccgcgtttccataaaccttgcagaaacgacttggagagcttgctgagcgagggccgcctggacaccagtgtgcagacgccgtgtcctcagcacccccacactcagctgtcctgcgagccccagcccctggaacactccagctgcctctccacttgtctggcgggatgtttcctcccggtgccctcatcaccccacacccaccctcttctcccgggctcccgatggctccccccaccacttgctctgctgatgggtacactctccccaggtctggctgtgaagccatcctgggtgcctcggtttcccctgctggccaggcagtcaccagctacctcagtgggaatgccactctctgccgccacccagcctgggtcagtgggacgcctgcactttcccaagttgcgttcctccagccctttctctggacactcggatgagaacaaggctactggccaagggcgtgagaacagggatcagcctcagagaccatcccatctctgtgagtgtcctgaagctgccaagcaaagtgccaccaacggggtggctgagaccaacagaagtgtattccctcttggttctgaggccagaagcctgagcttaaggcgtcaggagagccagccccactctggcagctctagaagagaatccgtttcttgctctcccagcttctggtgttgctggcaaccattagcattcttgacttgtggctgcgctgctcccatctctgtccccggggtcacgcggccttctccccggccttgctgtgtgtcccctcctcttgtaagactccagtcactgggtttagggcccacacaaatctagtatgacctcaccttgacttaatcacatctgcaaaggcccttcttccaaataaggtcatgttccccatttctgggtagatgtaaatttaggggagctgctatgtagcccagtgccatcctcctacaaaccccaggatggccgaggaatccagtctcaactgagatgcatcaggctgcttaggatcagagcccggaccatactgagcactcacattctctcctaatattctttcaagcattccagcaacatctattcctggaaaccccaggtcaatcccccaccaccagtgttgctgttgcctggagaagaaaatgctccagacccctccttcccagcctgctgggttccctccaacccaggcccagcccccttctccagggattgataagacgccatttccagatatattgttaagtggcaaaagcagacggcagtacgtagtgacacatcttttgtgtaataaagtgtaaggatatgtatatgtgcgtgtttatttatagatgcaaaagaaaagcactggaaagataaatcagaaactaataaaaatggtgacttt

SEQ ID NO: 4541 - DNA, 1824 bp, Homo sapiens
actgccggagcggggcggttatggcggctccatattaacagcctcctcctcctccgccgccgccgccgtctcctcctcctcctcctttccctcccgcccgcgctctaagccatctccgccttcaccctgacgcctgcctcttcccctcacctttccccctcccctgttctaccatgcccggcatgatggagaaagggcccgagttactggggaagaaccgatcggccaacggcagcgccaagagcccggcaggcggcggcggcagcggcgcctcgtccaccaacggcgggctgcactactcagagcccgagagcggctgcagcagcgacgacgagcacgatgttgggatgagagtcggagccgaataccaagctcggatccctgaatttgatccaggtgctacaaagtacacagataaagacaatggagggatgcttgtatggtctccatatcacagtatcccagatgccaaattggatgaatacattgcaattgcaaaggaaaagcatggctacaatgtggaacaggcacttggcatgttgttctggcataaacataacattgagaagtcccttgctgatctccctaatttcactccctttccggatgagtggacagtggaagataaagtcctatttgaacaagcctttagttttcatggaaagagctttcacaggattcagcaaatgcttccagataagacaattgcaagccttgtaaaatattactattcttggaaaaaaactcgctctaggacaagtttgatggatcgccaggctcgtaaactagctaatagacataatcagggtgacagtgatgatgatgtagaagaaacacatccaatggatgggaatgatagtgattatgatcccaaaaaagaagccaaaaaagagggtaatactgaacaacctgtccaaactagcaagattggacttggaagaagagagtatcagagtttacaacatcgccatcattctcagcgttctaagtgccgtccacctaagggcatgtatttaacccaggaagatgtggtagcagtttcctgtagtcccaatgcagccaacaccatcctgaggcaactggacatggagttgatctctctaaaacgtcaggttcagaatgctaagcaagtaaacagtgcacttaaacagaaaatggaaggtggaattgaagaattcaaacctcctgagtcaaatcagaaaattaatgcccgttggaccacagaggagcagcttctagcagtgcaaggtgtccgcaaatatggtaaagattttcaagctattgcagatgtaattggcaacaagactgttggccaagtgaagaacttctttgtaaactacaggcgtcggtttaacttagaggaggtattgcaggagtgggaagcagaacaaggaacccaggcttctaatggtgatgcttctactttaggggaggagacaaaaagtgcttctaatgtgccatcagggaagagcactgatgaagaagaggaggtgtgtttgtgtatggaatttgagctaatatgagttgaggaatcaccattttgtgtggtattctgtaaggttaatttgtcaagaggactagctaaattgagcatgaaaggttgacaatacacttcttcagtggtgcatctctcgtgactcttaagtcataatgacatgctaagttctgattctagaagaatggagagtgtattgttctttcatagtcttatttttattttcagtgttaagctgtttacaaataaagatgcctgtttggtagcctcattggtttttggtttttggttttgttttgtttaaaataaaagaagcttgtgcttccaat

SEQ ID NO: 4542 - DNA, 3300 bp, Homo sapiens
gcaatcaggctgcagctggagaggacaagggcggcttccgggtgttggcgggggcatttgtctcctgccgcagctggggctgcagatctagtcttcagttcacagagaactgccccccaactgctcccccgtactctgctcctacaggcccagctgctgtggctgtgcgacctgcagggactggcagacccgtagctaagacgccaggatttcctggaagcagagaaatgattacccgtgaggcagccgagagcgacccacccgcccactcgcagctccgaagcagcttcaagaaggaacaggatcccgaggcctggacgctggaccctacaccgccaccctcgtcccagcccgctgcaggccgcagttcctcggccgtggagtagttttagattccagttcctgggaccagcttgatattctttgtgcagaagccagcctggagccagccgacaggaataggcagaagcagaataatactgcagggctcgaggtctcactttgtcacccaagctggagtgaagtggcgtgacctcagctcactgcagcctcaacctcccgagttcaagctattctcctgcctcagtccccaagtagctgtgactacagatgtcctggatggattccaagatggccaaataggaacagttccggtctgcagctcccagcatgatcgacacagaagacaggtgatttctgcacttccaactgaggatcacagctccttgtcagcaatggaacaaagctggacgtagaatgactttgacgagttgacagaagtaggcttcagaaggttggtaataacaaacttctccgagctaaaggaggatgttggaacccattgcaaggaagctaaaaaccttgaaaaaagattagacgaatggcttacaagaataaacagtgtagagaagaccttaagtgacccaatggagctgaaaaccatggcacgagaactttgtgacacatgcacaagcttcaatagccgattcaatcaagtggaagaaagggtatcagtgattgaagatcaaataaatgaaataaagtgagaagacaaggttagagaaacaagagtaaaaagaaatgaagaaagcctccaagaaatatgggaccatgtgaaaagaccaaatctatatttgattggtgtactggaaagtgataaggagaatggaaccaagttggaaaacagtctgcaggatattatccaggagaacttccccaacctagcaaggcaggccaacattcaacttcaggaaatacagagaacaacacaaagatactctctgagaagagcgattccaagacacataattgtcagattcaccaaggttgaagtgtaggaaaaagtgttaagggcagccagagagaaaggtcaggttagccacaaagggaagcccatcagactaacagctgatctcttggcagaaaccctacaatccagaagagagtgggggccaatattcaacattcttaaagaaaataattttcaatccagagtttcatatccagccaaactaagcttcataagtgaaggagaaaataaaattctttactgacaagcaaatgctgagagattttgtcaccaccaggcctgccttacaagagctcctgaaggaagcactaaacatggaaagaaacacccggtaccagccagtgcaaaaacatgccaagttatagagaacatcaatgctaggaagaaactgcatcaattaatgggcaaataacagcgaatatcataatgacaggatcaaattcacacattacaatattaactgtaaacataaatgggctaaatgccccaattaaaggacacagactggcaaattggataaagagtcaagacccatcagtgtgctgtattcaggagacccatctcatgcgcaaattcacacataggttcaacataaagggatggaggaagatctaccaagaaaatggaaaacaaaaaaaggcaggggttgcaatccttgtctctgataaaacagactttaaaccaacaaagatcaaaggagacaaaggccattacataatggtaaagggatcaatgcaacaagaagagctaactatcctaaatatatatgcacccaatacaagagcacccagattcataaagcaagtccttagagacctacaaagagacttagactcccacacaataataatgggagactttaacaccgaactgtcaatattagaaagatcaacaaggcagaaggttaacaaagatatccaggacctgaactcagctctgcaacaaacagacccaatagacatccacagaaatctccacctcaaatcaacagagtatacattattctcagcaccacatatcacttattctaaatttgaccacataattggaagtaaagcactcctcaccaaatgtaaaagaacagaaatcacaacaaactgtctcttagaccacagtgcaatcaaattcgaacttaggattaagaagctcactcaaaactgaacaactacatggaaactgaacaatttgctcctgaatgactactgggtaaataacaaaatgaaggcagaaataaagatgttctttgaaaccaatgaaaacaaagacacaatgtaccagaatctctgggacacatttaaagcagtgtgtagggggaaattgatagcactaaatgcccagaagagaaagcaggaaagatctaaaattgaccccctaacatgacaattaaaagaactagagaagcaagagcaaacacattcaaaagctggcagaaggaaaaaataagatcagagcagagctgaaggagacagagacacaaaatcccttcaaaaaagcaatgaatccaggagctggttttttgaaaagatcaacaaaattgatagactgctagcaagactaataaagaaggaaagagagaggaatcaaatagatgcaataaaaatgataaaggggatatcaccactgagcccagggaagtaaaaactaccatcagagaatactataaacacctatacacaaataaacttgaacatctagaagaaatggataaattctgggacacatacacccttgcaagactaaaccaggaagaagttgaatatctgaatagaccaataacaggctctgaacttgaggcaataattaatagcctaccaaccaaaaaaaagtccaggaccagatggatccacagctgagttctaccagaggtacaaagaggagctggtaccagtctttctgaaacttttccaatcaatagaaaaagatagaatcctccctaattcatttaatgaggccaacatcatcctgataccaaagcctgacagagactcaac

SEQ ID NO: 4543 - DNA, 5075 bp, Homo sapiens
tatgctgacaaggcaagaatacctcagttggaatcccagaagggactgtgggtgagcactgatgtggaaattattggaaaaagccatgccaagctcacagtgggaagtgtctctcagaagcagtcaaaggcaaggcaggatcagttgatagcatgaatggaattttcaaaaatcacaggcgttgcctaagggaaggtcaggagctccccaagctcaagctgcgtggtgggtggcctcagataggttattttaactctgtgtgtgtttgtatatgtatttatggacctcagatgcatggaattagactaatcttaagctttggttcctgatacactgacattggtttatgcctggtcttcttttattttattattctaacaatgtaacacccatgaacctaacccaagaatttcaatattaataataacttacatctacttaagtcctcctcctgtatcctgttccctctccagaggaagaggaagacatatgatcctatttctaaggagtaagataataatataacagccggccgggcacagtggctcacgcctgtaatcccagcactttgggaggccgaggcaggcggatcacctgaggtcgggcattcgagaccagcctgacaaacatggagaaaccctgtctctactaaaaatacaaattagctgggcgtggtggtgcatggctgtaatcccagctattgggaaggctgaggcaggagaattgcttgaacccgggaggcagaggttgcaatgagctgagattgcaccattgcactccagcctggacaacaagagcgaaactctgtctcaaaaataataataataataatataatagcattctattaactgtttagtcttctaggacttgcactgtaatgccacagtccatcaggttgttgcacacagctgtgcttcatccattttcaacagaatgtaatatgtcattgtgtgaaattaccacaggacatggtttcaacatccacaaaatgattaacttgatgctctctgaggcgccttttagatatgagaatctaggaccctctgcaccgtcttaacccaagagtttgcttgatggagagcgggaagaataatgcaagttgcatctccaatatctcccctcccctccacagggttttgaaggccccacctgcagccacagggccccttcctgcggcttccatcactgccaccacggaggcctgtgtctgccctcccctaagccaggcttcccaccacgctgtgcctgcctcagtggctatgggggtcctgactgcctgaccccaccagctcctaaaggctgtggccctccctccccatgcctatacaatggcagctgctcagagaccacgggcttggggggcccaggctttcgatgctcctgccctcacagctctccagggccccggtgtcagaaacccggagccaaggggtgtgagggcagaagtggagatggggcctgcgatgctggctgcagtggcccgggaggaaactgggatggaggggactgctctctgggagtcccagacccctggaagggctgcccctcccactctcggtgctggcttctcttccgggacgggcagtgccacccacagtgtgactctgaagagtgtctgtttgatggctacgactgtgagacccctccagcctgcacgtgagcctgaaatccactggagccagggaaggagaggggtgggtgagaggaggaggaaggacgtagatggctctgagttacagtgtggccacagccttgggctccagggagtttccaccctaataaccatcactaaacaggggtcgaagactctggactccaacctagggtaatggggtggcatcagtatttaatgtggggcgtggcctttgggctcctctctaagagttgaaggaactcaggtctcaagcctccttccctaagccttgctgccatggagtatttcccctagcagtcagcacctcacagagggaaaagggcctgggactctcctttagaaacagaggagagcttgggagggtacagagaggggacagtctagggagacaggggtgttagcagacattggggtgtctggactaccatccaggacttgactaagctcattgctccacagctgcccccacttagcaaccaaagccctagagggcacaaaatatggggaattctttctagggtgaagaaaagagtcaggttttagggaggtcctgagtccccctctccttaccccacagtccagcctatgaccagtactgccatgatcacttccacaacgggcactgtgagaaaggctgcaacactgcagagtgtggctgggatggaggtgactgcaggcctgaagatggggacccagagtgggggccctccctggccctgctggtggtactgagccccccagccctagaccagcagctgtttgccctggcccgggtgctgtccctgactctgagggtaggactctgggtaaggaaggatcgtgatggcagggacatggtgtacccctatcctggggcccgggctgaagaaaagctaggaggaactcgggaccccacctatcaggagagagcagcccctcaaacgcagcccctgggcaaggagaccgactccctcagtgctgggtttgtggtggtcatgggtgtggatttgtcccgctgtggccctgaccacacggcatcccgctgtccctgggaccctgggcttctactccgcttccttgctgcgatggctgcagtgggagccctggagcccctgctgcctggaccactgctggctgtccaccctcatgcagggaccgcaccccctgccaaccagcttccctggcctgtgctgtgctccccagtggccggggtgattctcctggccctaggggctcttctcgtcctccagctcatccggcgtcgacgccgagagcatggagctctctggctgccccctggtttcactcgacggcctcggactcagtcagctccccaccgacgccggcccccactaggcgaggacagcattggtctcaaggcactgaagccaaaggcagaagttgatgaggatggagttgtgatgtgctcaggccctgaggagggagaggaggctgaagaaacaggcccaccctccacgtgccagctctggtctctgagtggtggctgtggggcgctccctcaggcagccatgctaactcctccccaggaatctgagatggaagcccctgacctggacacccgtggacctgatggggtgacacccctgatgtcagcagtttgctgtggggaagtacagtccgggaccttccaaggggcatggttgggatgtcctgagccctgggaacctctgctggatggaggggcctgtccccaggctcacaccgtgggcactggggagacccccctgcacctggctgcccgattctcccggccaaccgctgcccgccgcctccttgaggctggagccaaccccaaccagccagaccgggcagggcgcacaccccttcatgctgctgtggctgctgatgctcgggaggtctgccagcttctgctccgtagcagacaaactgcagtggacgctcgcacagaggacgggaccacacccttgatgctggctgccaggctggcggtggaagacctggttgaagaactgattgcagcccaagcagacgtgggggccagagataaatgggggaaaactgcgctgcactgggctgctgccgtgaacaacgcccgagccgcccgctcgcttctccaggccggagccgataaagatgcccaggacaacagggagcagacgccgctattcctggcggcgcgggaaggagcggtggaagtagcccagctactgctggggctgggggcagcccgagagctgcgggaccaggctgggctagcgccggcggacgtcgctcaccaacgtaaccactgggatctgctgacgctgctggaaggggctgggccaccagaggcccgtcacaaagccacgccgggccgcgaggctgggcccttcccgcgcgcacggacggtgtcagtaagcgtgcccccgcatgggggcggggctctgccgcgctgccggacgctgtcagccggagcaggccctcgtgggggcggagcttgtctgcaggctcggacttggtccgtagacttggctgcgcgggggggcggggcctattctcattgccggagcctctcgggagtaggagcaggaggaggcccgacccctcgcggccgtaggttttctgcaggcatgcgcgggcctcggcccaaccctgcgataatgcgaggaagatacggagtggctgccgggcgcggaggcagggtctcaacggatgactggccctgtgattgggtggccctgggagcttgcggttctgcctccaacattccgatcccgcctccttgccttactccgtccccggagcggggatcacctcaacttgactgtggtcccccagccctccaagaaatgcccataaaccaaggaggagagggtaaaaaaatagaagaatacatggtagggaggaattccaaaaatgattacccattaaaaggcaggctggaaggccttcctggttttaagatggatcccccaaaatgaagggttgtgagtttagtttctctcctaaaatgaatgtatgcccaccagagcagacatcttccacgtggagaagctgcagctctggaaagagggtttaagatgctaggatgaggcaggcccagtcctcctccagaaaataagacaggccacaggagggcagagtggagtggaaatacccctaagttggaaccaagaattgcaggcatatgggatgtaagatgttctttcctatatatggtttccaaagggtgcccctatgatccattgtccccactgcccacaaatggctgacaaatatttattgggcacctactatgtgccaggcactgtgtaggtgctgaaaagtggccaagggccacccccgctgatgactccttgcattccctcccctcacaacaaagaactccactgtggggatgaagcgcttcttctagccactgctatcgctatttaagaaccctaaatctgtcacccataataaagctgatttgaagtgtt

SEQ ID NO: 4544 - DNA, 2971 bp, Homo sapiens
attagcagcggacaggaccaaggcccatgatgtcccatcactctgaagagccttgagtccctgactcagttcccacttcctccttacacgtgcacagtgcccactccaggcctcgggcagtgcccctcgttcctggcagaggggagtgttcacaccacaagggtggggtctggagcagtcagggaggtgcgtgcaccagcggcagtgaggagggggctgcagaaggttcctgcctgctcctgacatcccagggtgttgtcatcactgggggaataggatggggagtggtgctgccaatgctgggcactgaccaagcagggcaggtgcttttcccaccgcatcctccacagcacccaccatcctcaggtctccccaagagcctgaccacctcccctgctgagctcccccttgcagcacttgtcttagagctgctgtgagctctgggagcaggggcagtgagggtggggagagaggagcaggtgcatggtggtgacaccatgtcccccaaagaagtctgcagggtggacccacaagcctttgttcccctccatagcctgtggtcatagaaggggctacagctcacgcatcgtgggtggaaacatgtccttgctctcgcagtggccctggcaggccagccttcagttccagggctaccacctgtgcgggggctctgtcatcacgcccctgtggatcatcactgctgcacactgtgtttatgagtgagtgctgctgaccatcttcccagacccctgttcactcctgggtcatgtcagggtggggctgctttgggtggtgagaagcgggtccagagggaagacagagagactaacctccaagtaatgtacagttggagaggagtctccagcctcactgtggacccatcatcatcagctgggggtaacttgtgaccctgagcttgttttaaggattgtagctcctagagaaagggcagacagaagaggaaggaagctcctgtgctggaggaaacccacaaaaatgaaaggacctagaccttcccatagctgattccagtggaccatgttatggcagagacagggtgagacggtggtgcgggaggctagagggaatatgttgggggccaggtactgggtctcttcttaaaatctcaggagtttagagtgcaagaaaactacagaaaagacttccaaacacaatggttctccctgatatttttaccccctattttgttgctgtttgatgaacagtagtgcctgatagactccttgcagtgaccaatgttgagttcagccctcaaatgccaagacgacctcagaggtgctgagagtgaggtctgggaaacacatggggtgtgggtctgtgtttctgtagggcgtggcagtgcagttgcatatacagcataaacaagcagggtgatgggaccacatcttgcctgataacctctcccaccatcttcctaggttttcaggatacctgaggtcaatgagttcagtggttggacttttcctgtgcttcacctcttgctcttctcatttcagcttgtacctccccaagtcatggaccatccaggtgggtctagtttccctgttggacaatccagccccatcccacttggtggagaagattgtctaccacagcaagtacaagccaaagaggctgggcaatgacatcgcccttatgaagctggccgggccactcacgttcaatgaaatgatccagcctgtgtgcctgcccaactctgaagagaacttccccgatggaaaagtgtgctggacgtcaggatggggggccacagaggatggaggtgacgcctcccctgtcctgaaccacgcggccgtccctttgatttccaacaagatctgcaaccacagggacgtgtacggtggcatcatctccccctccatgctctgcgcgggctacctgacgggtggcgtggacagctgccagggggacagcggggggcccctggtgtgtcaagagaggaggctgtggaagttagtgggagcgaccagctttggcatcggctgcgcagaggtgaacaagcctggggtgtacacccgtgtcacctccttcctggactggatccacgagcagatggagagagacctaaaaacctgaagaggaaggggacaagtagccacctgagttcctgaggtgatgaagacagcccgatcctcccctggactcccgtgtaggaacctgcacacgagcagacacccttggagctctgagttccggcaccagtagcaggcccgaaagaggcacccttccatctgattccagcacaaccttcaagctgctttttgttttttgtttttttgaggtggagtctcgctctgttgcccaggctggagtgcagtggcgaaatccctgctcactgcagcctccgcttccctggttcaagcgattctcttgcctcagcttccccagtagctgggaccacaggtgcccgccaccacacccaactaatttttgtatttttagtagagacagggtttcaccatgttggccaggctgctctcaaacccctgacctcaaatgatgtgcctgcttcagcctcccacagtgctgggattacaggcatgggccaccacgcctagcctcacgctcctttctgatcttcactaagaacaaaagaagcagcaacttgcaagggcggcctttcccactggtccatctggttttctttccagggtcttgcaaaattcctgacgagataagcagttatgtgacctcacgtgcaaagccaccaacagccactcagaaaagacgcaccagcccagaagtgcagaactgcagtcactgcacgttttcatctctagggaccagaaccaaacccaccctttctacttccaagacttattttcacatgtggggaggttaatctaggaatgactcgtttaaggcctattttcatgatttctttgtagcatttggtgcttgacgtattattgtcctttgattccaaataatatgtttccttccctcattg

SEQ ID NO: 4545 - DNA, 2961 bp, Homo sapiens
tagcaaacaatttaaaaaatcagaagatttgcctgcatgatgcagtggctcatgcctgtaatcccagcaccttggcctcccaaagcactgggattacagacgtgagccactgcgcccagcagatttctctttaacacctagatttcagcctgagccaggcaggcattcctgaatgaaccagtagtactgctcccagaagaagaggtcctcctccgtgtgacacagtccccacttggcccttgcagggattggatctgggatccctggatttaaactcagggccatcctcataacagcctcacaaggctgggattagcttcccagttcacaagggaagaaaccaagacttgagaaggtcaaggtctggccagacccacacatcttggaccctcataccgcctcgaggccccatgctgccctctgcctgctccagatgtgaatactgctggccctggctggccccggctggccccgagggtcctagggatgaacagcccagcccagggagagctcagccccttgtgcctctgccccttcccacctcctgtggaggccagtcgactcacccacaaagggccaggcactgtggggatagatcagctaacaaaacagttgatgcttcctgcccttctgggccttacattttggctggaagaagaggggagaggcagactgtaagcaataagcgcaataattaggttgcctggaagtaatgttagatcacgttacggaaaacaggaaagagcagagcaacaagtgctgggttgcgtggtgcagggaaggcagctggctgctgctggtgtggtcagagtgggccctcatggagaagactgcattcgagcagaaacttgaagggggtgaggggtgagcctagagatatctggggcagagcagtccaggcagaggggacagccggtgtcaagcccaggacaggagtgtgcctggtgtgccagtttcaggcaagaggccagtgtgcagaggcaaggtgagaacgcaagggagagcagtggcggagacgggtgggaacgaggtcagacctgctggcctccagcctctgcatggggcttggctcttgctgggagcaatgggaagcagtacacagtttcatgcagggggagaaggcctgtcttgggttgcaggggcacgctgtggcagctgggatcagagagaggagcttgtaggccagttgttatgtggtcccacgggccagatggccatggcttacctcacttcagggaggctgtgagaagcactcagaatctggatgtgccttgggggtgggccccactggatttcctggtggacctggtgtggggtgtgagaggagggtgtgtttggctgcagcagacaggagaatggagttgccatccgcgtgatggggatggctgtgggaggagaggtttggggtgagggaatcaggaactgagtgctggacatggcaagtctgaaggcgcagtggtcgtccactcagagaccttggagttggagatggaggtgtgggagtcctgaacagttagatgtagtgtttaccgcgagaaggaacagggcttgcggccagccctcctgtgttcccgtgacccagggcagggcaggaggggcctgagcctgccgagtgactgggacctccttccaggagatcatgcacgccctgaagatgacctggcacgtgcactgctttacctgtgctgcctgcaagacgcccatccggaacagggccttctacatggaggagggcgtgccctattgcgagcgaggtacccactggccagtgagggtgaggagggatggtgcatggggcaggcatgaatccaggtcctctttctctctgcccccattctcagactatgagaagatgtttggcacgaaatgccatggctgtgacttcaagatcgacgctggggaccgcttcctggaggccctgggcttcagctggcatgacacctgcttcgtctgtgcggtgagagccccgcccctcgaactgagccccaagcccaccggccctctgttcattccccaggagatgcaggagaagttgggaaggggcctctcctgctgcccccaaccccatgtgactgggcctttgctgtccttagatatgtcagatcaacctggaaggaaagaccttctactccaagaaggacaggcctctctgcaagagccatgccttctctcatgtgtgagccccttctgcccacagctgccgcggtggcccctagcctgaggggcctggagtcgtggccctgcatttctgggtagggctggcaatggttgccttaaccctggctcctggcccgagcctggggctccctgggccctgccccacccaccttatcctcccaccccactccctccaccaccacagcacaccggtgctggccacaccagccccctttcacctccagtgccacaataaacctgtacccagctgtgtcttgtgtgcccttcccctgtgcatccggaggggcagaatttgaggcacgtggcagggtggagagtaagatggttttcttgggctggccatctgggtggtcctcgtgatgcagacatggcgggctcatggttagtggaggaggtacaggcgagaccccatgtgccaggcccggtgcccacagacatgaggggagccactggtctggcctggcttggaggttagagaagggtagttaggaagggtagttagcatggtggctcatgcctgtgatcccagcactttggaaggccaaggtgggcagatcgcttgaggtcaggagttcgagacctcatggccaacacggtgaaacagcgtctctagtaaaaatacaaaaattagccgagtgtggtggggcatgcctgtaatcccagccactcaggaggctgaggcgggaaaatcacttgaacctgggaagtggaggttgcagtgagctgagatcacaccactgcacgcgagcctgggtggcagatggcagagcgagaccctgcttc

SEQ ID NO: 4546 - DNA, 2807 bp, Homo sapiens
actggacatctgcagagaggacaagaaatggggcacccacacaatcaaaaccccaggggaaaaggcttgaaggttcagccaaaaatccagcccctctcaaaggacaaagatcaaccttccagaacaattagcaaacacttctcagagtcctccatgctgtgcagatggtaagcatctctgggagtctcgccagcactgtgagtaaggcagcctttttacccatttcacagaaggagaaactaaggcttagtaaggtcaagtaactaattctgcctcccacacttcactccctagagttttatgtgtgcatctgttaaagttctccttttatcgccagcagtgtttatgtataattaaaatagctcacatctgttgattaacagtcacattacaacctgcattaactcttccacttaatgcctgttaaaggattagcaaaccattttacagatgaggaaggcagggcacagagaattaatgtccacaccatgcttatcagtgagtggagcagggattcaaacctagaccttctgggtctagagccctcctcagccatcacctctcattctccattagagttggttatcatgtgagttgaggcccaaaggttaatggaagttattattcttcttcaccaccaattgaactttttatctttacctactgtcctctccatccttttaatgctttgtaccctaaaatccgcttagatattaactttgccagttctttctttttggttacatgtgccaggtatactttgtcaaacttttaattttgggtgttttgctttgttttttgttggtgagacaagatctcactctgtcgcccaggctggagtgcagtggtgcaatctgggctcactgcaacccccgcctcctgggcataagcaatcttcctgccttggcctcccaagtagctgagaccacaggcatgagccaccacacccagctaactacttgtaatttttttgatagagacaggtcttgccatgtcactcagactgatctcaaaactcctgggctcaggcgacccacccaccttggcctcccaaagtgctgggattataggtgtgagccactgcacctgacccaatttgtaattttgaacctcttcttactatcctgtttcagttttttttttttgtaaacaactatagctggattttgttttctaacccagtctaaagcagtctcagattttgttagaacaactgaaggatctgacatttgtatgtcactttattctatgtgaatggtttattttacccctttttccatagttttgatggtttgggcaaattactatttattctctttctaattgtcaatctatcattacagcaaatggttgcttcctgatcattatatagaaacagggtaagcacctgcctcccgctaggactctctctgcttccttccgccctacccaccccagtaagagctacccaagaaggctcctatccctgccaccttccactgatattttcctataaactgtgagactcaactaacaaggattccctctccttccaacttggggtccctattctgatcaactgccatttcattagggcctttcttgatgatttccttcatacgtaacacaagcgggaatatcctctgaatttcgcttgctcgtctgcaaaatatatttcttagtctggtcagggaatggtattaatgctctggtgaggcttcctgggcccaggccagccagagtcctccggttttcagtgctgcaaatgaggaatctgctgccaatgtgtttcttttcttcctcctttgtcaattatctatttattctgctgggaagcctctttgattttatctgtagctttcaagaatgtcaccaggagatgccaagggtgtatctttttcttcaatgtaaccctgcctggaactctaacaaccttttcaatgtgcaaactcatgcccttttctgatcagggaaaatttctactattatttattgatcatatttgccatgtccagacctgcttcctcttctccttccacagcccctaacattcacaggtagatgaaaagacatccaccaaacctatattttctttcgtgacttccacctgtgtttctggttttctgggaggcctttgtttcccagaaacaggaaaaccatcctcttttccacttgatgttttgaattttctaaatttgaaaatcctagttctagaacctgttttcttgggcagtatctggatttccctgggtttttgaaacctaacacttgtccagtatgtgccgcttggctttccttttccctccagctgggggtccctcaaggctactccatgtccccagcagccaggtccagctgtggggtccccttccagtgggtgcacggttatgcctctggcccctgacctgccctggggcagcaatagctttcagcaacctctgggacagagggcaagggaagaatagagcagaaagactctaaccccatctaagcccactcaggactccaaggacaggaatcgattcacactttctcttctgacttgtttttgtagagataaggttttgtcacgttgcccaggctgggtcttgaactcccagactcaagtgatcctccagccttggcctcccaaagtgctaggattacaggtgtgagccactgcacccagccaggtgcctttgtaagagaccttagcccccttgcctcttctgccatgtgaggacacagggaatcagaaagtgggtcccttaccagacacaaaatctgctggcaccttgatcttggactttgtctccagaattgtgagaataaatttctgtttataagcc

SEQ ID NO: 4547 - DNA, 3857 bp, Homo sapiens
aaagacagtctaccctggaaaaaaagattcatgagctagagaaacaagggaccattaaaattcagaagaaaggggatggggatatcgccatactgccagttgtggcttctggcacattgtccatggggtcagaagtggtagcaggtaactctgtgggacccacaatgggggccgcttcctcaggacccttgccccctcctccaccaccactgcctccctcatcagacacacctgaaacagtgcaaaatggtccagtaacaccacctatgccaccgcctcctcctctcccaggccctgcagctgagactgtaccagctcctcccttagcacctccccttccctctgcacctccgctgcctggaacatcttcacccacagtggttttcaactcaggattagcagctgtgaaaattaagaagccaatcaagacgaagttcagaatgccagtgtttaactgggttgctctgaagcccaatcagatcaatggcacagtcttcaatgaaattgatgatgagcgaattctggaggatttaaatgtggatgaatttgaggaaatattcaagacaaaagcccaaggacctgccattgatctttcttcaagcaaacagaagataccacagaagggatcaaacaaagtgacattactagaagcaaacagggccaaaaatcttgccataactttaaggaaagctggaaagactgctgatgaaatatgtaaagctattcatgtatttgacttgaagacactgcctgtggactttgtggaatgcttgatgcggttcctaccaactgagaatgaagtgaaagtgcttcggctctacgagcgggaaaggaagcctctggaaaacttgtcagatgaagatcggttcatgatgcagtttagtaaaatcgagaggctcatgcagaagatgaccatcatggccttcattgggaactttgctgaaagcattcagatgctgactcctcaactacatgcgattatagcagcatctgtctctataaagtcgtcccaaaaactcaagaaaattctggagatcatcttagcccttggaaactacatgaatagcagtaaaagaggagcagtttatggatttaaacttcagagtttagatctgctcttagatacaaagtcaacagacagaaagcaaacactgttgcactatatatccaatgtggtgaaagaaaaatatcaccaagtgtccctgttttataatgagcttcattatgtggaaaaagctgctgcagtctcccttgagaatgttttgctggatgtcaaggagctccagaggggaatggacttgaccaagagagagtacaccatgcatgaccataacacgctgctgaaggagttcatcctcaacaatgaggggaagctgaagaagctgcaggatgatgccaagatcgcacaggatgcctttgatgatgttgtgaagtattttggagaaaaccccaagacaacaccaccctctgtcttctttcctgtctttgtccggtttgtgaaagcatataagcaagcagaagaggaaaatgagctgaggaaaaagcaggaacaagctctcatggaaaaactcctagagcaagaagctctgatggagcagcaggatccaaagtctccttctcataaatcaaagaggcagcagcaagagttaattgcagaattaagaagacgacaagttaaagataacagacatgtatatgagggaaaagatggtgccattgaagatattatcacagccttaaagaagaataatatcactaaatttccaaatgttcactcgagggtaaggatttcttctagcacaccggtggtggaggatacacagagctgatcttagaaaccaaccatacagacgagccgatgcggtgaggagaagcgtcaggcggcgctttgatgatcagaacttgcgttctgttaatggtgccgaaataacaatgtgaacctgagactggcctgcatgaatacagggtgtgcgtgaatgaaactgcccacatgaactttatgtgctacgatttaactgcagccttgaacacacacaaaaatattcttaagggctcagatttagcaaacacggaagaattttaaaatgagctctcctttcaacccttgttaacaagtgcctaaaaatggaagtacctgttcagattaatcaaagcaataggatttgatttgattaggtatctttttacaccagtatgttatttttaaccaaaatgtaaagttcttattaaactcattacctgccattgtgattgtcccatcatggcccacctggtttcctgatgttgtaaataacatcaatgcatctgctgtgggtcctttgctgagatgtcttcgaaggaattttgttttagccatatccatcaactttgtattttacttgcaatttggaagaaggaaagtcacatgatgaaactccttttgtctataaccaggccctggcaaagtgcaaacaggatgcaactgcagtggcacaaaggtcactcaatcctttgtttccagtttcacattctactacttctgcgctagagaacgatgctctgtgagaggcattcactagtatgaatgtggggatatagtgtataagacttatttgcagtactgtgttcttcagctagaggcagctttttaaataatgcaagtgtatttattagcattaaaattaacatctcagtaatcagcattagcatttctgaggaccattattaattctgagaacagaaattggtgccttgcaaggaagtttactagctctatcaacaagcattcaaggttacatctgctagcagagtagtgttaggaacctggccttactctcctctgacaatcgcaattttttcttattttttataaattcaagaagatacacttggcatcgtgtatcgaggctaagtttttcatgcatttcccagactacttatggagaattgcagtttaagttgctgaaaagtattaacatggtattaagcttaaataatacgtaatgggactagatggcccactaagccactgttattttccttcctctctggcagggcacttgatccattccaaagtcaaaaactggactgaagctaaatttgtacttttcataatatacattctgcttctggcttatcttcttggtacatcaatatattaattgtaaagtttattgtatagtatttaaccgctgaagttcctattttatgttgtgcttatgtgaaccccttggtgaaggtcccttttccttggatgtgtagttatatgatctttttaaatgtacagatattttgctataaaatcggtgcagttttttatggtttttacacttctctttaattcccacctaagcctctgggtaatattgtaaatattgttttaaaatgcatcagcctatgctatacaatctgaatgttattttaacttatagttttttttaatatatatatttaactataaggacagtttagggaacaagttacctaccacatttcactttagtgtacctatttacagaaagattaaactgccacctgcgggcacattcccataaatgtgtactttactttaaaaagaacatgccacgattttgtctttctgtggactcaacattcacttcgattaaaaatagcaatttgaccaagttggacttccactacaaagcagctgttttccaaagttcaatgctgacatatatgtatattaaaataattgcctatttattaatctacaaatagacaacgttggcatgttcttttctgtttgtctattaatgggcctgcttcttagcaatattagaatgttttataaaagcaattcatgttacttttctggtcttttcatggcatatgagcaaataataaactatttacactac

SEQ ID NO: 4548 - DNA, 1586 bp, Homo sapiens
aaaaaagactcaacccgccccagagcacagcttcgccgagcccacctggtccccatcccggccttggcaatgaccctggcggcttcctcccagcgttcccaaatcattcgctccaagttccgatctgtcctccagcttcggatccacagacggaatcaggagcagatctcggatccggacccgtggatctcagcctcagaccctcctctggccccggccttgccctcgggcacggcccctttcctcttcagccctggggtcctgctccccgagccagaatattgtcctccttggaggtccccaaagaaggagtctcccaagatctcccaacgttggagggagtccaagcccagggggaacttgacataccaccagtacatgcccccagagccgagacagggatccagggcagacccccaagccgaggggtccgccctgggtcctcctgggccatctctgtgggaagggacagactcgcagcagccacatcctaggatgaagccctctcccctcactccctgcccaccaggagtccctagcccctcgccacccccacacaagttggaacttcagacccttaaactggaggagctgacggtctcagagctccggcagcagctgcgcctgcggggcctcccagtgtcggggaccaagtctatgctcctggagcgcatgcgcggcggcgcgccgccccgcgagcggccgaagccgcggcgcgaggacagtcccgcgggtgctccctggccgcgcctcaagcccaaggccctggcagccgcccggcgtcagggctcggtcaagcccagcgcagcatctcacaggccacctcttccacgcgccgcggataccccggggacggctccggctccaactcccactccggctcctgctgcagctccagccctgaccccttcctcagggccgggctcagcggctctgactctggaggaggagctgcaggaagcgatccggagggcgcagttgcttcctaaccggggcatcgatgacatcctggaggatcaggtggagcctgatgaccccctgccccctattcccctggacttccctggctccttcgacgtgctgtccccctccccggactctgaaggcctctcatctgttttctcctcttcactcccgtctcccacgaactcctcctccccttctcccagggaccccacggactccctggactggctggaggccctgagcgggggtcctcctctgggttctggtcccccaccccccagcatcttctccgctgacttatctgactccagcagcagccggctgtgggacctgctggaggatccatggtgatggattctaggatttacagagacagagaactgatgggggtggagagaagctccttgtgggaggagagggaactaccagcagagcccctcctaccgcagacacaggatcggagacaacctccaaccccacctgcctcctgaagtgctgctgacatgcaactgccttaactttgcctacctggcctccttatgatccccctccggcgtggtatggttggggggcttcttttgctgctggccacggcaaacaagctgcttgctgcttccttc

SEQ ID NO: 4549 - DNA, 3366 bp, Homo sapiens
gaaacagaagcaggctggaggggcccaggggcctgctaagctgggtcccaggagaaggataccatttccatccctcaagcacccatacaagtttatagagggaaaccgcacaagctgccctctggtggcagatgcttgaaattccagcagaggcccatctgtctcacaggatgggtcaaggcctgcctagcaaggtagggaagtctttcctcgtgtctggccagcagccagactgctaacagctatctctcccaaccacaggcccagccctcctctctaccccctgtccccttcctgcggatatagacagcacttccctgctcccactgcagcccctggcgccccctaccccaggttcacccacccatccttgatgctaggttctggtgtacctggtcacccagcagccatcccccacccggccattgtgcccccctcagggaagcaggagctgcagcccttcgaccgcaacctgaagacacaagcagagtccaaggcagagaaggaggccaagaagccaaccatcaagaagcccctcaatgccttcatgctgtacatgaaggagatgagagccaaggtcattgcagagtgcacacttaaggagagcgctgccatcaaccagatcctgggccgcagggtgagaccatgggcaggtgggctggcagggatgctccccgaccatcttcagcctggtgcagcctgctgactccctgatgcaccccacctgcccctcttccctgttgcagtggcacgcgctgtcgcgagaagagcaggccaagtactatgagctggcccgcaaggagaggcagctgcacatgcagctatacccaggctggtcagcgcgggacaactacgtgagtgcctagtgacacacagcaggggtgggcaggggaccctttgagataccatgccccaggccacaatctcagtaaggaacgcagaactactgtcctgaaggcaccgatgaggaagggcacggagggtccaaggcctcccatggctgcctcagaagaggacaagcccacatcctattctccactccagaatatgctcacacatgagctgttacccaacatttgattgggccacatgggcagaaggggagaaaggggtctggaagtcacctccttccattcaaactggagaccagattggggtgagggaagagcttctaaatgcactccatagcagcctagcaagaccagcaatcaagaaacaccagcaccccaaggggaagaagaagaggcggtcgagggaaaagcaccaagaatccaccacagaccctggctcgcctaagaaatgccgtgctcgctttggcctcaaccagcagacggattggtgtggtccgtgcaggaggaaaaagaaatgcattcggtacttacccggagaaggccgctgccccagccccgttccttccgatgacagtgctctaggctgccccgggtccccagctccccaggactcaccctcataccatctgctgccccgcttccccacagaactgcttactagccctgcggagccggcacctacatccccaggtctctccactgctctcagcctcccaaccccagggcccccacaggccccccgcagcaccctgcagagcacacaggtacagcaacaggaatctcagagacaggtggcctagcaggcacaggacacctggccgcctccaggagcctaccccctgaaagtgacagagacccagatctcatggaaactggccaggggtcctgttaacgtcatctcagggtccagaccctgaagatttcagaggctgcagaacttctgcctgaacctggggtcatcgattcaaactgctccaagtggtgggaatcagatctgtcttgatgtgtcatctaattaagggaatcccttgtacctatggctgcctgcatctattctttgtaccatctgtcttgccagccagaagcctctgcctccctagcttttctgctataggtcagagatgggctgaactgagcctagctaccttctctacccatctcccccatcccccactgccacaccctccccattcagacacctcatggaccaagaatgagctggtttgtcaaacaacatgtgagcatggtcacaagcacaaagctcaagatgacagctcttctaaggaaatggagaagctctgtttataaaaacaaaaacaaaaccagctgctactcataagttggaccagaggaagccccttactatgatctcaggagcttgcaagaagcaggaaggggaatggaataggttaagtttaggcctatcaacctaagcaacagaaataatctgacactaccttatcaggcaaattggggaggggagggtgtatctagctctagttcaaattatttggaagtgttccctgagaaacccaccagcctaagaagctctggccccaggcttgtcactagcagctgcagtcaacagttcaaagaagtcatggcccaaatccagtgtgcacccctccccattcacagagcctttttcacaattccatttccagttcatctatggcagtccagccagctcctgggcagcttgagagggcaaacccaaaacctcatgacagccagagcctgtctttcagcattcagtccgcctggccggctccagtttccccatggggctgcgggacagaggaccattacaactagatcaaggagcccagaaaacctccagtagtggacaacaggttttcaccatagcctacgttaacccatttttgagccaagcttcaaccctcagccttgaaaaacaagtctttaatttaatttttgttttttgcctaaatccaaagaaaaagggctgccgggccaggcgcggtggctcacgcctgtaatcccagcactttggcaggccgaggcaggtggatcacctgacgtcagtagtttgagaccagcctggccaacatggtgaaaccctgtatctactaaaaatacaaaaattagccggacgtggtggtgcgcgcatgtaatcccagctactcgggaggctgaggcggaagaatcacttgaacccgggaggcggaggttccagtgagccgagatggcgctattgcactccagtctgggtaacagggagactgcatctcaaaaaaaaaaaaaaaaaaaaaaaagggctgtccatgtattcacacacccctcaaaaaaagcctttagttcctactttagccactggtttctcagaatccaaagatcacatattctagtgtaacactgcaagaagtcttgagaaaaagattattgtagtgttcaaaatatttttgtattgttaatgcatcatcatagaaaaacttttaaacatgagaataaagatactttttactgggtttgtttttcaaagcctgaccctgag

SEQ ID NO: 4550 - DNA, 2856 bp, Homo sapiens
tcttctgcagtggataggtcatttacatcttttcttgttatttggctaggttctgaagccagacacaagatgaaaaagctaactccaaaacagaaattttctgaagatttagagtcatataagatatcagtggtaatgcaggaatcagctgagaaactttcagaaaagttacataagtgtaaagaatttgtggacagttgcaggcttactttccctactagtggtgatgaatacagcaggggcttccttcaaaaccttaaccttattcaagatcagaatgcgcaaacaaggtggaagcagggcagatatgatgaggatggcaaacccttcaatcaaagatctttgcttttggggcatgagcgaattctcacaagagcaaagtcttatgaatgcagtgaatgtggaaaagtcattaggcgtaaggcatggtttgatcaacatcaaagaattcactttttagagaatccttttgagtgtaaggtctgtgggcaagccttcagacagcggtcagctcttacggtccataaacagtgtcacctgcaaaacaagccatacagatgtcatgactgtggaaagtgttttcggcagctcgcgttcttgttgaacataagaggattcacaccaaagaaaaaccttataaatgtagcaaatgtgaaaaaacgtttagtcagaattcaacccttattcgacatcaggtgatccatagtggagaaaaacgccataaatgccttgagtgtggaaaagcctttggccggcattcaacccttctatgtcatcaacagattcacagtaaaccgaacacccataaatgcagtgaatgtggacagtcctttggtaggaatgtggatctcattcagcatcaaagaatccatacaaaggaggaattctttcaatgtggagaatgtgggaaaacgtttagttttaagaggaatctttttcgacatcaggtcattcacactggaagccaaccctaccgatgtgtcatatgtggaaaatctttcaagtggcacacaagctttattaagcaccagggcactcacaaaggacagatatccacatgatgttaattggaaagcagtcattggagaactagaacttataaacctctacttcaagtgtgtatcacgtaattgtttccatgaaaagcaataaatgtaacaaagggtttttctatgggagccatctttgtgtagccaatctgtagcgaagaaacgcttaaaaggaaatgttagcttgggcaacacagtgagatcccatctctacaaaaaataacaaagccaggtgtggtggctcacacctccagtcccagctactaagaaggctgggtgacagagtgaggctgtctcaaaaaaaaaaaagaaagggctgggcgcggtggctcacgcctgtagtcccagcactttgggaggccgaggtgggcggatcacgaggtcaggagatcgagaccatcctggctaacacggtgaaaccccgtttccgctgaaagatcaaaaaattagccgggtgtggtggcaggcgcctgtggtcccagctatgcgggaggctgaggcgggagaatggcgtgaacccaggaggcggagcttgcagtgagctgagatcgtgccactgcactccagcctgggcgacggagcgagactccgtctcaaaaaaaaaaaaaaaaaaaaaacagagaaaaggttattaggctgttgtgtccactctcttgcaccctctatgccctcattccctccagcctagttaaggcagaagggagccatagaagctgtgccgtgtggttgccaggctggggaccattgcatgggttgtgaatgattgaaggtttgaagacggccagtatggtgtcgcatgtctgtaatcccagcactttgggaggctgaggctggagaatcacttgaggtcggttcaggaccagcctggccaacatggtgaggccccgtctctactgaagatacaaaaattggctgtttgggaggctgaggcaggagaatcgcttggacctgggaggtggaggttgcggtgagccgggaacacgccactgcactccagcctcagcaacagagtgagactccatctcaaaaaaaaaaaaagattgaagaatgcctttcctgtattacatacaactattacatgctaacgtatagacttaaaaaacaaaacaaaactaagggctactcactagtaactagtgaggtatgaagaactaaaagttgcccataatcaggccgggcatggtggctcacacctgtaatcccagcactttgggaggccaaggcgggtgggtcacaaggtcaggagttcaggacaagcctagccaagatggtgaaaccccgtctctactaaaaatacaaaatttagccaggcacagtggtgggcgcctataatcccagctgcttgggaggctgaggtaggagaatcacctacctcaaccgggaggcagaggttgcagtgagctgagattgcgccactgcactccagcctgggcgacagaccaagactccatctcaaaaaaaaaaaaaaaaaaaagttgcccataatctaaaatgagtatgttagattctgataagagttgtaagtcagcccggcgcagtggctcacgcctgtaatcccagcactttgggaggctgaggcgagtggatcacgaggtcaggagtttgagaccagcctggccaatatggtgaaaccccatctctactaaaaaatacaaaaattagccgagcatggtggtgcgcgcctgtagtcccagctacccaggaggctgaggcaggagaatcgcttgaacctgggaggtagaggttgcagtgagctgagatcatgccactgcactccagcctcggtgacagagtaagactccatctc

SEQ ID NO: 4551 - DNA, 3523 bp, Homo sapiens
atgtctaaattgcttttctgtgatggaactgcttgtactctatatcctgttcataatgcagatcaaataagattatactattatttttcttttgccgtagctcaggacagtggtgagtttcagactcctctaggtaaggcccagcttggcgtaggggttgtgtgtgcacctgacctgggaatgggctttatatttctctcgtgtgcactcttctgtgagctgaggttcaaaggctaacggcgagcttggcgctgaggaggccgtgcacggtgcacttggttgtgttgggctctgctgaacacctctccagaccctccgaggacagtccactcctgagccctgccctgcaggagccaagcaagagctgaggcagccacttttgcatctgcattctttgtggaaagagagcaaacacactacagttctcatataagccactgactccagcctggcagcttctaaaagagaggctcagcagagtttgttaacatggcctcaccactcctcgtggcccctctggacagccaggagggttggtggtagcgtagcctcactgcaaaggatggagaaaccgagccacagagaggcccaggctagggtgtccagctccagcctgacaaggtgatggagctgggaccagcatccgcccttccagaatctacctaaattgcctgtagagaccactcaaataatgaaccagtatgtcctgagtgcttaccgtgtgttaagtactctaccaagcactgcagagaatgcagaggaaatgtaagatatggtcctgccctctgagaatttccaatccagttggattattatcctatctccggcataatcatgtattaataatgtcttcgagctccagatagcagttgtctccctccctcctcccttcctcattagcagatgggccgttgggtgggcttccttctcctcccatgcccccgccatagtcctcagcttcctttcctgacaaagagctagtcctgtagggagatatgttttacgagtacatagatatgtacacatgcacacactcacacagagagacacacacaggccttctcatcctaacaaacccttaataagcacgattctgacccctgtgactttctgtttgctggaggtagcgctccccctataagctgttctttaaaacctcttagcctttctgcgtgtgcttggtgtggtgcatgaaaagtcgattctttgtgttgctcccatctagaggggaggtcaggaggtttagacctctgcgctgtctggtcgggagtggggagggctccgaggggccgggcgggggctggaggggagcaccagcaaattgattcctggcactttctctgctccccttggtgagggctggccttgcctgtatcggccaagagacccagaataggctgagcggaccttgccagagctgcttgtcagcggggactgctctgtcagcagggagagccaaaaagggccgttccacccctgagaggcggcagggctgggctgggctgggcaggccaggcctcagacactggggggtggtgtgagggaaggctggtgaggcggcgagaagcgcggctgcctccgaaccttcccggctgaacctcccttgcgttgctttccccggcaggtgcccattctgcatttattccaccaaccgccccgctgccatggagtgccacctcaagacccactacaagatggagtacaagtgccggatctgccagacggtgaaggccaaccagctggagctggagacgcgcacccgggagcaccgcctgggcaaccactacaagtgcgaccagtgcggctacctgtccaagaccgccaacaagctcatcgagcacgtgcgcgtccacaccggggagcggcccttccactgtgaccagtgcagctacagctgcaagcgcaaggacaatctcaacctgcacaagaagctgaagcacgccccacgccagaccttcagctgcgaagagtgcctgttcaagaccacacaccctttcgtcttcagccgccacgtcaagaagcaccagagtggggactgccccgaggaggacaagaagggcctgtgtccagcccccaaggaaccggccggcccgggggccccgctcctggtggtcgggagctcccggaatctcctgtctcccctgtcagttatgtctgcctcccaggctctgcagaccgtggccctgtcggcagcccacggcagcagctcagagcccaacctggcactcaaggctttggccttcaacggctcccctttgcgctttgacaagtaccggaactcagattttgcccatctcattcccttgacaatgttataccccaagaaccacttggatctcacattccaccctccccgacctcagactgcgcctcccagcatcccctcacccaaacaccccttcctggcctatctcggactgagagaaagagcagagactgtctgagggcagccatgttctgtaccaaaaacagagagacaaaagacaaaaaaaaaaaaaaaaccacaaaacttaaacacaaccccagcaggtgtatgttgctgcaaaacctacagaccccgatgggtctggaacatgtgtactgtatatctttagtaaggaatagaaaattggctctgtgtgtatacctattgcattgacctgaaagctgctttatccaatcttcagagaggtgacctactgcatacttctaccttcagaggcatgcctccccagccacccactcccactctcagcccttctccgtacttttctctgaaaggaatcttgtcttgttaaaccctaaagagagtgtccttaatagcaatcagcacttgtaagcttatatactggtgcatttggttttctgttgggtgaatgcggtgtgtgggcgtttgtggattctgaaagagaaagccgtgtgtcgtgtgccatgacatttctattgcacattctttgtactggcttctttaacagcgatgaacgttcttttccctcctgggttgttcatccacgacagtctctccctgtgctccttcatcacctttccctctctctttgatggctacagagtggtagggcctggtgcttagtcgatgaaggaatggtagccatctacagtgctgctggagatttccgccagagcgctggagaccttgcgctcagatcttctctggtgatgaagaggcgaggaatcaagtgactgatctggaagaaatatctcgcagcactgcagctaacatcacagaacttaagtgtgttttgtgtgtgtgcccacacgtagacaaatgtgtacggtgcacacacacagtgcatcattttttaagggcagattatatatatatatgagatgtattaattcagtggttaccatttgtttgcaggaaaaagaaatgtatgggtgaaaaaatttatggttgataaatccagccaaggagattaaaaggggtttggataaattctgggtacaaatgctcagactaaaaaaaagaaatggcagttttgcacagtgctatggtcttgcactagtttttgtttctcatctg

SEQ ID NO: 4552 - DNA, 2216 bp, Homo sapiens
taaattaaacatgactttgaggcttcacgccagggtcagccctaggttgttatttagagcacagtattctggaggatctcgccagtttgggcctggaacagatagtatggcattcctgctgtccaggttcacgtaactcttgctcctaggcagcctgtgtgcaagtcatacccaggcttggagccttggtcagtggtcagaggccagcctcccaaggcccactcagcttctgcgacctgcaccagcttttgttttctttctagtcctgggaatagcccttctcccgttttctcatttttttcccctcaaagataccaggttcccttcttttccctctggagtgtcctcttgtgataggttcttttcagtggctttaagcaggttcttttcagtggctttaagcaggagtcacagagcttttgcttctagccgggctacatagcctttcttggagcccagtaaagcaccctgccatcattagaaaaacccaaggtaggaagtacaaatccacctctaggaataattggggatattctttttttttttttttttgagacggagttttgctctttttgcccaggctagagtgcaatggcatgatctcggcttactgcaacctccacctcctgggttcaagcaattcttctgcctcagcctcccaagtagctgggattacaggcgcctgccagcacgcctggctaatttggggatattcttcttttttaagacagagctttgctctgtcacccaagctagaatgcagtggcacgatctctgctctctgtagcctctgccttctgggttcaagcgattctccttcctcagcctcccaagtagctgggattacaggtgcctgctaccacgctcagctaatttttgtgtttttagtacagatgaggtttcaccaccttggccaggctggtctcgaactcctgacctcaagtgatctgcctgcctcggcctcccaaagtgctgggattacagatgtgaaccaccacgcccagcctctttggggatattcttgtccttatttttcttttatcgtgttatataagaaggtagttttattatatttgtaacttggtgaacaggtagtctttttcttttttttcttttttggagacgaagtctcgcactgtctgccaggctggagtgcagtgatgcgatctcagctcactgctacctctgcctcccagcttcaagtgattctcctgcctcggcctcccaaagtgctgggattacaggcatgagcccccgcgcccggctaggctttttcttattttaatatatcgcgatgagaccatttaactttattatcttatacacttctgtatttctcattggttcttccggctgtttggctaaaaatgtgtaaaaatcccaagggcggtgctttttgttggcgaggcttacctgtgtgtttctctttgctcgatcctgcccgttgatgaattcctcccttctttgcgtcctccccggcccctgcttcgtcctcctgactcgtctacctgttcggtcctccatcttgctttagcgagtgtggggtggctgtggtgactgccactgggaccatttattccacctgaggttggttggtagctgaggatcttagtaaggtgctctgtctggagtagatggcacagcaggtgaggcagcatggggtcagcgttgtcccccagcatctgtagtaaagggtaacttcctttaacaggaacgcttttgtcatggcctgggcacacaaggcagtttctcatttttttccaccaggtgacagcatgggacctcttcagcagagagcgaatctgagagcaggaagtcgcataggtaaaccagggttcacattccccattcttaggaagacatctgctaaggaagcacccatttctcatcagcaaatatcacaaatactctgaaagagggacagagcagattagaacgggattgtcattttggttcatgttcttttccctgaattgattgaggctgtgagatgcttttgggcatcactctgtaccctgaaaagtggttatgcttgcgacactcccagagccagagcagccgtgttcccagctggagcctcccctgcagagaggtctcaggaatggcctgtgctggagctgccctcggttgtgactacagggcggctatgtgctgtgaactcgcgggaaagcgggagtgggcatgcttccagtcgctggtgctgggatctgtggccc

SEQ ID NO: 4553 - DNA, 3065 bp, Homo sapiens
ctacaccactggcgtcacttctcgcctcatccactcccaggaggagctgatccagtgcctgaagcagggggccctgtcccgcaccacagccagcacccagatgaacgtgcagagctcacgctcccacgccatcttcaccatccacctgtgccagatgcgcatgtgcacccagcccgacctggtgaatgaggcggtgactgggcttcctgatggtacacctccctcgagtgagtatgagacactcactgctaagtttcactttgtggacctggccggctcagagcggctgaagcggacaggggctactggcgagcgggccaaggagggcatctccatcaactgtggcctggtaggcacatggtgggtcatcagccccagcacccacacagctcagtctcagacccctccaaggccctgcagtcctacacctgctgagtcctccttggacatcttgccaattagcccttcactctcaggcgtcacccctgtccccagcttccccatttcaccaacttatccatgtgcctataaacccacccaaggagcaagagggctgctggggccaaagaggcagctggccttgggcaatgtgatcagcgccttaggggaccagagcaagaaggtggtgcacgtttcctacagggactccaagctcactcggctcctccaggattcgctggggggcaacagccagaccatcatgatcgcctgtgtgagcccctcagaccgagatttcatggagaccctcaacacactcaaatatgccaatcgggcccgcaacatcaagaacaaggtggtagtgaaccaggacaagaccagccagcaaatcagtgcactgcgggctgagattgctcggctgcagatggagctgatggagtataaggcggtgagcatgctcctgggcattgcccagcactccccttggagctagtgctccatatgcaccctctgccctgcagcctcaccctaacttcctcagcatccctcccacctccctattaccatcatccactttggacatgactcttgagcatcagttgtgtgccaggcatgctgcttactattagggactcacccatgtgaatcaagcatagtctgagccctcaagattttagaatactaagtccaagaaagaagggctccccagcttttgttgcatagatcttgtgcacagggcagacactctccagggtgttttcatatctgctgaatgtgttgtgttggaacaggtaagactgctagactggcacagaatcgttgatagaggggcccacaggagtatccagtgtgctgcagaggggcagaggagagagttggccttacttgcatggatggtcagagagggcctcatggaaaaaggggccttttatatggattttgaagaatgaatgaggtaacagcaaaatgagatgggacagccattctaggtaaagaacaagccatgcacaaaggaacagagtgggaaaaaatgggtcctttggggtaaatgtctaattctatgtgactaagacagaagtcaccaattggtagcccatggcccaaatctggcacatggatgagtttaggtttggcttgcacttgttttaaaagaatacaacgtagttgtcaacctttctgaaaatcagggagtttcagttttgctagaaaattttcaagatctaacaactcatggtaccaagttggctggagaggcataggggctgccccttctagactgagtctgggactctcttagttccagtctctaccactccctattgtcttacaaccagcctgactcatttatgccaactgcctggcagagagggttttgacccttggactagactttatggagatatgaaaatacactgtggaaagttaggtcaagtaagattgtgagaggccttcagtggctggttacaaaatttggactttttattgtcaaggagaactgtgtaaggtttttgatcactgggggccagtagctgtgttttaggaaacctggggcaggggagactggtgatgcgccatatccaggggaaggccagggcgctggcagagggaggggcatcatcagccccttacccccccaaccgcgagctctgctgcctgactgctcccctttgcccctgctcccagggcaagcgagtgataggagaggatggcgctgagggctatagtgatctgttccgagagaatgccatgctacagaaggagaatggggccctgcggctgcgggtgaaagccatgcaggaggccatcgatgccatcaacaaccgcgtcacccagctcatgagccaggaggccaacctgctgctagccaaggccggtgagttgggctgtgccaggccaggtcagagcaccaacgggctaggactccctcccccgacatccaccccagagtatcaggtggactaagccagccagtcaattcatagttcaactcatttatgcattttttttcacttgattttaaaacatttttgtatggcacaagtaatacatgaacacatccttcttgttcaacatgcaaacaatacatcactatatgaagtgaaagattaaaatcgcctctccctgaaccctccaccccaagccctctctacttctcagaaggaacctctatgagcagcttggtgtgtattttcccacacctttctcagtatttgtttcaagtatgaatatgtattcatatacattcttaaatgtgtgtatgatatagactactttttctatgtatgagattatatatattgctctaagacttccctttttcatttagcattatgttttataaatctttccatattaaacctacttctggttcacgcctgtaatcccagcactttgggaggccacggcgggagaatcacttgagcccgggagtttgagaccagcctgggcaacgtggggacgcctagtctctacaaagggtacagaagttggccggatgtggtggcgcatgcctgtagttcatgttacttgggaggctgagatggagggattgcctgagcccgggaggctgaggctgcagtcagctgtgactctagcctgggcgacagagcaagaccttggctctaacc

SEQ ID NO: 4554 - DNA, 2854 bp, Homo sapiens
agaccacgcgggactccctggctgcgccacgcccgcgccccgtgctcgtcctgcacgcgatgtccagcttgtcgcaagtaacgacacggaacagctcgaacgctcgtgactttattgcagaaaagccccgcagtgctggagcgcagcctaggctggggttgcccctgctggcgtccgcgggacccagtctggcttctgtagcggggcagggcggggtccacgcagggcgcagaggcggggacgcggccagcacggggggtgcccagcacgggggccttacttgatgacagtcgcttaccagtcctgaacaccttactggggcttagtactccggatgaccgtgcgaggtcactgttacagccctctacaaatgaagcggcacagagaggccgcgtaactcgcccgggggtgcagtcggtgaaggagtccgtccggggaccccctgcgaagctgcctctgcccactggattccgggtctgagaaaagggcacaggcgacaccccgccttcgcggcccgtctgggatggcacggaagtcggggtcgtccgcgcagaggtgggcacggggcgcaggcgggcgcggccggctagggctgcagctcgtactgccgctcggtggccgtgtagaagtcctccagcaccgactgcaggaactcgaaggtgggccgctcctcgggccggctgcgccagcactcggcgatgacgccgcggtacagctcgggcgggcaggtgtcggggcgcggcatgcggtagccgcgctccaggttgcggatgacctcggggttgctcatccctgcggcagaggagaccgcaagcgggggtgaggggctggggtcctcggtgggtggggggccctgagcgtcccgcggggcacagtgggcccaggcaagggacagcagtgcccacagtcccagaccacttctccagcctcgtgcgttgcctggctgcccggtctctaaacagccctttatttactttttattgcctggggaatgcctagaaatgaggctgtagattttctcctgagtacggggcaggtcctctgaagatgggaccctccctctcttgattacctgtgaccaccaggggcacagccaagcccatcactcatgggcagctgccaggtgcacacagcagcaggtgacccggagcctgcccacctgtgggggccaagtggctggagcccttcgactggggctgggggctgtcgtccacgattctggccacacaggaaggggctttggggaatccactatgggtgcaaagccaaggtaggcacaacctgtcctcaactgagaacaagccattgggagtaaacttgagttcggatgtgccctttgtcttgatttcagtttgagggactcatttgacctctgctggaggaaggagacacagccctgtggcccagagcaatagtgatgcagggggcagagctccaccccagatgccatgcctgggtctccgtcttcgctctgggactcactctgaaaagaacagggcagccacaggcaccaagcacaggcgacctgccatcagggccggccgggaaagcagggagccgcgagctgcggggtgagccacctacctgggtatggcacccgcccataagtgacaacttccatcaggaggactccaaacgaccacacgtctgctttgatggtgaagaccccgaagtggatggcttccggggctgtccacttgatggggaacttggcccctgtgggaaaagccatgcaagctttgggaggccacggccggtggcccctaccctccatcctcacccctacccctgctcctgctgtccttccatcaagcccccactgcggggcctcacagggcggggcggccaggcatggcgggggagccactaccgcacaccaggacacatgaccaggtgagtgcagacacgacatcagcagcacagaaagacgatatggacaccaataccacacagtcacccactttggttctttaaaaagagagcgatggcctcaatgggcagccaccacgtttccacctgggatggaaggggcctgtttcaccttacaggggccttgtttaatttaaaagacatggcctgggcaagccatttaaacctgcgggcgcctccgttagtcccttcctgcaaaatggaaatggtgacacttgtacctccgagggccgctatgaggaagaactcacatccggctgccctgtgaagcacctcaatggctgcagccccggccagcatttggagcagacctcagggcttggcacttcacagcctcccctggcctccatttctcggtctccccagccagcctgaagttcccgagagaacaagccatatcctgtctgcttgtcatctgactcataggctcagcagacactgcttgctagcttgataaatatatgtgaccccttcagattctcttgtgacgtagatttccacctcagttatatgcacagagtaaaacagtgctccgtggacaccctaatacaggttggtttgctgatcgcacatgagagctgtgtttcccacagtgtgctctgtgaaagcctaattccatggaaggttaatagggactatataaaaatagtatttgggcatggcttacacctgtcatcccagcactttgggaggtcaaggcaggcagatcacctaaattcaggagttcgagaccagcctggccaacatggtgaaaccccatctctactaaacatacaaaaattagccaggtgtagtggcacacgcctgtaatcccaactacttgggaggctgaggcagaagaattgcttgaacccaggaggcggaggttgcagtgagccaagattgtgccactgcactccagcctgggtgacagagactccatctc

SEQ ID NO: 4555 - DNA, 2961 bp, Homo sapiens
agacagcctaccctccgcccaggggaagcggctgcctccgccaggccgcttccaggaagccccgggccaggccccagcattgttcaggccctggggccagcaccccagccagccgaacaccatgaagtccagcggccctgtggagaggctgctcagagccctggggaggagggacagcagccgggccgcaagcaggcctaggaaagctgagcctcatagcttccgggagaaggttttccggaagaaacctccagtctgtgcagtatgtaaggtgaccatcgatgggacaggcgtttcgtgcagagtctgcaaggtggcgacgcacagaaaatgtgaagcaaaggtgacttcagcctgtcaggccttgcctcccgtggagttgcggcgaaacacggccccagtcaggcgcatagagcacctgggatccaccaaatctctgaaccactcaaagcagcgcagcactctgcccaggagcttcagcctggacccgctcatggagcggcgctgggacttagacctcacctacgtgacggagcgcatcttggccgccgccttccccgcgcggcccgatgaacagcggcaccggggccacctgcgcgagctggcccatgtgctgcaatccaagcaccgggacaagtacctgctcttcaacctttcagagaaaaggcatgacctgacccgcttaaaccccaaggttcaagacttcggctggcctgagctgcatgctccacccctggacaagctgtgctccatctgcaaagccatggagacatggctcagtgctgacccacagcacgtggtcgtactatactgcaagggaaacaagggcaagcttggggtcatcgtttctgcctacatgcactacagcaagatctctgcaggggcggaccaggcactggccactcttaccatgcggaaattctgcgaggacaaggtggccacagaactgcagccctcccagcgtcgatatatcagctacttcagtgggctgctatctggctccatcagaatgaacagcagccctctcttcctgcactatgtgctcatccccatgctgccagcctttgaacctggcacaggcttccagcccttccttaaaatctaccagtccatgcagcttgtctacacatctggagtctatcacattgcaggccctggtccccagcagctttgcatcagcctggagccagccctcctcctcaaaggcgatgtcatggtaacatgttatcacaagggtggccggggcacagaccggaccctcgtgttccgagtccagttccacacctgcaccatccacggaccacagctcactttccccaaggaccagcttgacgaagcctggactgatgagaggttccccttccaagcctccgtggagtttgtcttctcctccagccccgagaagatcaaaggcagcactccacggaacgacccctcggtctctgtcgactacaacaccactgagccagccgtgcgctgggactcctatgagaacttcaaccagcaccacgaggacagtgtggatggctccttgacccacacccggggtcccctggatggcagtccttatgcccaggtgcagcggcctccccggcagacccccccggcaccctctccagagcctccaccaccccccatgctctctgtcagcagcgactcaggccattcctccacgctgaccacagagccggctgctgagtcccctggccggccgccccctacagctgctgaacggcaggagctggatcgcctcctaggaggctgcggagtggccagtgggggccggggagctgggcgcgagacggccatcctagatgacgaagagcagcccactgtgggcggaggcccccacctcggagtgtatccaggccataggcctggcctcagccgccactgctcctgccgccagggctaccgggagccctgcggggttcccaatgggggctactaccggccagagggaaccctggagaggaggcgactggcctacgggggctatgagggatccccccagggctacgccgaggcctcgatggagaagaggcgcctctgccgatcgctgtcagaggggctatacccctacccacctgagatggggaaaccagccactggggactttggctaccgggccagctctgcagctctgagctgtagcccccgcccgacaccagctgttgtccacttcaaggtgtcagcccagggcattacactgacggacaaccaaaggaagctcttctttcgccgccattatccagtgaacagcatcaccttctccagcactgaccctcaagaccggagatggaccaacccagacgggaccacctccaagatctttggtttcgtggccaagaagccgggaagcccctgggagaatgtgtgtcacctctttgcagagcttgacccagatcagcctgctggcgccattgtcaccttcatcaccaaagttctactgggccagagaaaatgaaggaaggccacaagctcagagcccacatcaacactgcccccctcccagcaccccacagccctcacatcccctggcctggacccaggagacccaggagaaagcaccctcccttaggaatgaggagtgggcatcaggcctgggacactgctctccttccccgcccccagcctgctaagttaagtggacaggcccacaagatgaccttgcatgtgagcagatggcagagatgggtgtgtgaggggtgaggaggcatcagcagttgagccccgaaggagatcaggcagccccacctgcaggagaacgtcagccctccaggggatcagcccctgccagttccacccagctgcaggtgccagcacggcagggatgggagaggggtggggagcgagtcactgcctcctctgagcagagattcagagtaggatcacatgaataggggaaaaaagagagtctatttttgtctaataataaagaatttctataaactttagccg

SEQ ID NO: 4556 - DNA, 2737 bp, Homo sapiens
tttcaggaggaagatcaagatgatcaaggaattaactcagaacctaaatactttcttcattgaatttatctatggatgccttctctttgttgaattcttttcttctcttttctcttttttcttttcttttctctcttctcttctcttctcttttttctctgtcgcccaggctggagtgcaatggcatgatctcggctcactgcaacctccgcctcccaggttcaagcatctctcctgcctcagcctcccgagtagctgggattacagatgcccaccaccaagtccagctaatttttgtatttttagtagagacagggtttcgccatgttggctaggttggtctcgaacttctgacctcaagtgacccgcccgcctcggcctcccaaagtgctggaattacaggcctgagccaccatgcctggccttgaattattttccatccccagaaatttatcattctcttgaaactttattcttctagatcagcggtatcagtagaactttttgtgaccatggaaatgttctgtgtctgtattgtcagtgcagaagacacaagccacatgtggccatcaggcacttgaaatttgctagtgggactgaggaactgaagttttagttttagttaagttatactttatattagaatagccacatatggctaggggacagtacagttgcaaggagaagtcagagtagagctatgtgtgtaaagcttacagggggggccataacgttggtcagattcctctcacctaagatctattaacagtaatgctgtctccagcttaaaactcttcgctgacttccatcatccttaaagtctttatcatggagttatgatgtctgtaatctatttaaaaatacttcttcatagaccatctgatagtatatatttgccagttagtttcagcctcaacttcaggggaatgtgaattacattaatgaagcatccacattccatgatgtcacctagctttacatcttcaagggtgcactctccaggggctgccatcagtgcagcactctctatagtttgatcaacacctttactagttagcatagtgactgtcagaaacagcttggatttttttgtttttttgagacgggggtctctgttgcccaggctggagcgtaatggcacgatcttagctcactgcaacctctgcttcctaggcttaagcaatcctcctgtctcagcctcccgagtagctgggactacaggcgcgtgccaccatgccttgctaatttttgtattttttgtagagacagggttttgccatgttgcccaggctggtctcaagctcctggattcaagtgatctactcaccttggcctcccaaagtgctgggattacaggcatggcccactgcacctggccaatttttactggtgagattagtgtcttactgattaacaaaatgagtattagaagtaggcgctcattagtgaaattgaagtattcaaaagcagaattgggccagatgtggtggcttatgggctacagagcaagaccctatctctgcaaaaaatgaaaaaattagccaggcatggtggcatgtgcctgtggttccagctgctcgggagtctgaggtaggaggattatttgggcccaggagttagggcccaaataatgcagtgaactatgatcctgtcactgcaccagcctgggcaacaaagcgagaccctgaaatattcctatgcttgcatgaagaaggaatatgaatctagcagggcctgtaacttcttcccttggagatggcgcctgaggcgtaattccttaatgatcctttggcctttggttaggatttctggttgcctgatgtgactccaagggcaacagaaccctgcctctgggatattgtcagttctattgtgagtgaacctttttcataagtggtggttggaataactagaggcagaaagagctgggacagcatggagcttctagaatagtttgtgtgaactgctttgggcctggctcactaaggaatatctgtttaatagatgtctttaggtgtgctagaatttggtctggaacttgctttctttgtcacaagattgtaaaagaggtgctaacactcaccacctgaaacatttttctcaactgttaaagagcctatgagatgtatattaccaaaatggcttagctcctgcttgacttggctgttctctacctctctatgcttatcttataccacttacccctcactcctaaatctcaaaccacacagaccttctctgttcctccagtgtggcaagttccatcccacctcaggtcccatacccatgatgtcccatctgtcttgaatgcccttgtgctttataatatttgcatagtttaaaacataataaagcaacactgtgttccactaccctgcttaagtaatgtaacatttctagtcctttagaagccctgtacgtcctccttctacactgcactccttccctctacctcagaggttatgactaccctgaatttgttattatttatatatttttaaaaatatatagtgatggggtttcatcatgttgcccaggctggtctcgagctcctgggctcaggtgatccaccacctcagcctcccatattgctgggattacaggcatgagccaccatgcccggcctaccgtgaattttttgttaatcattctttggcttttcttgaaagtgttaccacatatgtatggcttgctaaacagtgtattaaatcttacattttcccaacattctgtaatg

SEQ ID NO: 4557 - DNA, 2321 bp, Homo sapiens
tttgcagtttcactggcattgctctatgtggaagacataaggcattctcatgctgtgaaatcagaagaacacagagactctccagattggcagagaatttgagagaccactcatgcatgaacacactccaaataaaggggtattggacctgagatatccaaaggatattttttccagttatttcactagttattcacagaacatctcttgatgttggtcattctggggcaatattctcagttccatttggcttttcattatattcatatttaatttggaggatattgattatatttataactactgttttaaaattattgcctgggctggaatcagtggctcatgcctgtaatcccagcacttggggaggccaagggagaagtgctgccaccaggagacacgacgacgataattccattaaactggatgttaaaatcaccacctggacactttgggctcctcctcctattaagtcaacaggccaagaatggagttatggtgttggctggggtaactgacccagagtatcaagatgaaatcagtctactactccacaatgaaggtcatctgaaagaggtgaagatggagggagcacgtctaggtcttccaggaagagctgagagtcttgaacaccaagtgcaaagccatctcaacatgattgcccagagtcaaaggacattccagaagaaagatgctggaaaagccattattctcagcaaactaacacaggaacagaaaaccaaacactgcatgttctcacttcactgaagacagaatttctgtttgctttcttcaaaaaaatttgggaaagagtcatttattttcagaatttcatacctaccaaggaactaatactacagagaaacatagggaaaagggtatttgtactttatatagactaaataaatatctggcagaagcaggattctctccatatgtgtaacagtaaaagcttttctttggcttgagtcaggaacaaaagaagaaagaaaattctatggatcctgagagtagagaaaacctatcccctggttttcagagacaaaggcaacagaactggagaaggggcacctaagagatgatcctctgggaaccacatcaaagattcttcactcgagctttgcaaagaagagaaaattagagatctttgggatctgaaggggccatgcacaccgatgtagtgaatatctcaggggccatcagtattgacttatgacttcagatcagatttgtttctccccaaccaagacctgacggccaaaatcttagcactgtataatatcctcaagtagtagatactgctccccaaagagagtgggtataaaatttcaggtacaaattatattgagtttttatattttatccctaccagcctaatagaagatttcagtcagaaattacaatgagttaaagaaaatgaagaaagcttgtttgcttcgatccctggatacatctggattcatacccaatacatatttgatgcctcaattaattcctacaacagaactacaaaaaaagaaattcctctaccccttattacagatagaaaacctagaaagaaaaatttaagtagtttcttaagatagcacagctagtttatgatggtgctgggagtcaaccctaagtcttttcaaatctaaaatcatcatatctgttatcctgtagtacccatatcacaaggttgagtaggctgggaaaaatctgctattggccaatctgactctttttaagttactatgaatctgggatgcactcttgcctcttcatgtgagtagagagacaaagcagatctttggtgttcggtctcaaaagtaaactctactaaataatatatttcataaacacaacaaaacaccaaattggactcctcataagcattttatagcctaatttcttcgcatagttctgctttgtagtgattctgaaaggacaaatcccatgaggaataaagatctatctgtagtaattgagaaattttctgaagattagagacttagctgctttgaagaaaactttggcaagccccaggagtcaagaaatcagctgggaatagttcaggggcactcactggcgctccacatgcattggaaggaggctggcaccaaatggttgcccaaagagctgccagtcgagattggcacttgtgcaccaagactaagggggaagcaagttgcaagacagtggtgccagctggaaaaatactgcctgtgaaaagaaggagatgagcttctatggaggtaccaaacaataatttctgaagtgtatacaaggatggctgaagtgtggacatgagactggaaacagaggcagggcaatgatgc

SEQ ID NO: 4558 - DNA, 2297 bp, Homo sapiens
cggatgcacctacgcctgcgccctgaggtcgggcgctcgcgggccaggagcggggagccggcgggcagcgccgcggctcgtgaggtgatggcggcggccccggcccggggaggcggaggcggaggcggaggcggcggcggctgctccggctccggctccagcgcctcgcggggcttctatttcaacacggtcctgtcactggcccgctccctggcggtgcagagaccagcatccttggagaaggtccgaaagcttctttgcatgtgtccagtggatttccatgggatctttcagttagatgaaagacggagagatgcagtgattgcattgggcatttttctgattgaatctgatcttcagcacaaagattgtgtggttccttaccttcttcgacttctcaaaggtctcccaaaagtgtattgggtagaagaaagcacagctcggaaaggcagaggtgccctcccggttgcagagagcttcagcttctgcttggtaactctgctgtctgatgtggcctatagggatccttcacttagggatgagattttagaggtgcttttgcaggttttgcatgtcctcttggggatgtgccaggccttggagattcaagacaaagaatacctttgcaagtatgctatcccatgcctgataggaatctcgcgagcatttgggcgttacagcaacatggaagagtctctcctctcaaagctctttcccaaaatccctcctcattccctccgtgtcctggaagagcttgaaggtgttcgaaggcgttcctttaatgacttccgctccatcctccccagcaatctgctgactgtctgtcaggagggtaccctgaagaggaaaaccagcagtgtgtccagcatctctcaggtcagccctgaacgcggcatgccccctcccagttcccctggaggatctgcctttcactactttgaagcctcctgcttgcccgatgggactgccctagagcctgagtactacttttcaaccatcagctccagcttctcagtctctccccttttcaacggtgtcacatataaggagtttaacattccattggaaatgcttcgggaactcttaaacctggtgaagaagatcgttgaggaggctgttctcaaatctttggatgccattgtagccagtgtgatggaggccaaccccagtgctgatctctactacacttccttcagtgaccctctctacctgaccatgttcaagatgctgcgtgacactctgtactacatgaaggacctcccgacctcttttgtgaaggagatccatgattttgtgctggagcagttcaacacgagccagggggagctccagaagattctacatgacgcagaccggatccacaatgagctgagccccctcaaactgcgctgtcaggcgaatgctgcctgtgtggacctcatggtgtgggctgtgaaggacgagcagggtgcagaaaacctttgcatcaagctatctgagaagctgcagtccaagacgtccagcaaagtcattattgctcacttgcccctgctgatctgctgtctgcagggtttgggccgcctgtgcgagaggttcccggtggtggtgcactctgtgacaccgtccttgcgagacttcctggtcatcccgtccccagttctggtgaagctctacaagtaccacagtcagtaccacacagttgctggcaatgatataaaaatcagtgtgaccaatgagcattccgagtcaaccctgaacgtcatgtcgggtaagaagagccagccctccatgtacgagcagctccgagacatcgctattgacaacatctgcaggtgcctgaaggctggattgacggtggacccagtgattgtggaggcgttcttggccagcctgtccaaccggctctacatctctcaggagagcgacaaggacgctcacttgattcccgaccacacaatccgagccttgggacacattgcggtggccttgagggacaccccgaaggtcatggagcccattctgcagatcctacagcagaaattctgccagccaccctcccccctcgatgtgctgattattgaccagctgggctgcctggttatcaccggaaatcaatacatctatcaggaagtgtggaacctcttccagcagatcagtgtgaaggccagctccgttgtatactcagccaccaaagattacaaggaccacggctataggtaactggacctcattgtcacttttttatcatgacagtatttaacttactttaaaaatgtgaggtttgtgaatttgtctcttaaataaactcttcttgcaag

SEQ ID NO: 4559 - DNA, 2107 bp, Homo sapiens
gttatgacctgggaaatgtgagcaggtagaggctacattaagaagtttgctctttgaccaataaaagccctggaaagattttaatcagagcaggcctgcccttcagacagtgactcttgaggtccaggcacagccctgtgtggaagatagtgtgtgaggctgaaacccagagtgtgtcatcatctggaaacaaccctgcaaagcccactcatgtgacatgcatggagctcttcagcagggacttactgaccaggacaagagcttgagactttgaggggatctgattgtcactgcacaatcaaggacagtattcccaagagtggatgttgctcaagatagtccaaggaattctatgaagaaaaggactccacagacaataaattttggacaccctgtttcaacacaggtgcatcttagagactggtgtttgcaagtatatggagcaggaaacttcatcccgaagatggagaccccggggctgtcagcaggcgttaggctttataagtcagtggagcctgcggaagtggccagaatccagcactccaagcactgctgtcttctcacagagtcttgaagccagagcagcgccaggatgtcacgggagctggccccactgctgcttctcctcctctccatccacagcgccctggccatgaggatctgctccttcaacgtcaggtcctttggggaaagcaagcaggaagacaagaatgccatggatgtcattgtgaaggtcatcaaacgctgtgacatcatactcgtgatggaaatcaaggacagcaacaacaggatctgccccatactgatggagaagctgaacagaaattcaaggagaggcataacatacaactatgtgattagctctcggcttggaagaaacacatataaagaacaatatgcctttctctacaaggaaaagctggtgtctgtgaagaggagttatcactaccatgactatcaggatggagacgcagatgtgttttccagggagccctttgtggtctggttccaatctccccacactgctgtcaaagacttcgtgattatccccctgcacaccaccccagagacatccgttaaggagatcgatgagttggttgaggtctacacggacgtgaaacaccgctggaaggcggagaatttcattttcatgggtgacttcaatgccggctgcagctacgtccccaagaaggcctggaagaacgtccgcttgaggactgaccccaggtttgtttggctgatcggggaccaagaggacaccacggtgaagaagagcaccaactgtgcatatgacaggattgtgcttagaggacaagaaatcgtcagttctgttgttcccaagtcaaacagtgtttttgacttccagaaagcttacaagctgactgaagaggaggtaaggttgccatcttgtctttctatgccattgtcctggaaggatgagttagcttgggcaacatgatgagactccatctctatgaaaaattcaaaaaaattagctgggcatggtgatgcatgcctatggtcccagctacttgggaggctgaggtgggaggatcacttgagtccaggaagcggaggttgcagtgagccaagatcacaccactgcactccaggctgggcaacagagtgagatcctgtctcaaaaaaaaaaaaaaaaagatgggttgatgccaccctttgaggtcaccactgaagacacaacattgggcactagaccttgaccctcaatgcctatgattctgtgatttgaggcccctccaaaatttctgatcgagctggtcttggaatgacgcttaccagtaagtgttctgtggggtgacttcgggcatttcctctcccctccctggtcctaaatttgctcatcgctaaaatgaaagcatctcccaggcatctcctaatttccatgtctacctcccctttctccttataggccctggatgtcagcgaccactttccagttgaatttaaactacagtcttcaagggccttcaccaacagcaaaaaatctgtcactctaaggaagaaaacaaagagcaaacgctcctagacccaagggtctcatcttattaaccatttcttgcctctaaataaaatgtctctaacagat

SEQ ID NO: 4560 - DNA, 1566 bp, Homo sapiens
ctttctctcaacctccatttccaagcacagagtctaaattattctaaacaccacccgaggaggcaggtgctgtacagatggggaaactgaggcagcacagagcgcaaaggacaggggggcgtcaaattcctcacttgatcgctccctcagccagccccttcctggaaagtgcttgggtatctttgtaagcctccgtttcttgagagagggccaggtttcgaaccgcagacatgcctctactctaggtaagacccctctctctctctcccggcctcggcggtctgctctgtgcaatggggccggccgagacgccctctctccagccagagtctgagccttcggagaccaccgcgcgactccgccccgtcggccgccactcacgccctctacggctctccattggcagaacgacctgctgccccgcccccacggcgcctttgcgagctaatcatttacttgagactgacagccttgccggcaccgccccccctggggcgggagcaaagcagctgcatatgcggattggttgagaggcagggggcggggtgagttggtgagcgccgattgcgggcagaggcagtggcacatgcggattggccggagagagcggcgaggcagagcatgatgagtgtcgattggacggctgggcccaagtgggcggaaaacggacggtgcagggggtgggccacgtgtccagccctaacgaaacggtaaccagccctgggaagcccgcaagaggcctcagcggtggccgtccgagagccgagaggtgagggtgcccccgcctcacctgcagaggggccgttccgggctcgaacccggcaccttccggaaaatggcggctgccaggcccagcctgggccgagtcctcccaggatcctctgtcctgttcctgtgtgacatgcaggagaagttccgccacaacatcgcctacttcccacagatcgtctcagtggctgcccgcatgctcaagaacacgaccctggacctcctagaccgggggctgcaggtccatgtggtggtggacgcctgctcctcacgcagccaggtggaccggctggtggctctggcccgcatgagacagagtggtgccttcctctccaccagcgaagggctcattctgcagcttgtgggcgatgccgtccacccccagttcaaggagatccagaaactcatcaaggagcccgccccagacagcggactgctgggcctcttccaaggccagaactccctcctccactgaactccaaccctgccttgagggaagaccaccctcctgtcacccggacctcagtggaagcccgttccccccatccctggatcccaagagtggtgcgatccaccaggagtgccgcccccttgtggggggggcagggtgctgccttcccattggacagctgctcccggaaatgcaaatgagactcctggaaactgggtgggaattggctgagccaagatggaggcggggctcggccccgggccacttcacggggcgggaaggggaggggaagaagagtctcagactgtgggacacggactcgcagaataaacatatatgtggctgtg

SEQ ID NO: 4561 - DNA, 3038 bp, Homo sapiens
acttcccctgaggcgctgtgtgagcactgaggctgctgtcccaggctgagcagtaataggcaggcttgtccttggtctggaggccagagatggtcagagatgccatgttcctgaccgggagccagggaatctctctgagatccctgagagttggctgtttttcctgttgatcaggtgtttgggggcatggccctggtgctgctgcagccagacagctccatctttgccaacattgttgctgtccccagtgcagtacaggagagggtgaccttctgtcccacggtccctgacaccgaggcttcctgggtcagcgcagactgtgcccaggaccctggaacagaggaggcaggcacagagaggcagtcacctgagcagagggtgagaagctggaggaggagaggggtccaggccatggtggagatgccccaggctctgcttcctaagcccacagctgagcagaactgcacagagtctctcttatcctctcctcctaagagggcacagagcacccttcatgcaaatcacacccctccccctgctatccctgggcctgaacttggggaaagttgagtgtggggtggggctagaggagcctcttctgctcctgggaggtcccagctgctgggccccagaaagcacagagcagagggcccagggtaggggtccagggcctggtttcccagttgaaacccccacagaccctcagggacaggccacacttccctccactgtctcagagcccaggttcattcctgactggcttgaaggtcctcagcactgccttgcgcacaccatccccacacagaggcagcgctcacgcccctccacccccaccccaggctctttgtgctgcaggtgctcaccacagcacatttctcgctgcaagatgggcctcctcagcatgaagtcatcctctgcttcttccccatttagatttttgtgtggttggggccataggtgagtgagcctcagagagaacatgtcctgcacccagtggccaggagggcaggagggttaacaaccctccccagcctccatatgggcctgagggcacctgcttctctctctcatcataccccacatccccccgtgggaggccgggctccgtgaccctcatcactgtcctcatcacacccttgatggggtgagacccttaatgaaaatgcacagggaaattattcaagaagagaccatcattatgaaagagagaaaagtctgcttctcttatggatacttggacctgaggaagatgaccaaggtcaccactctccctagatacagcccagagaggggccaccgggatgactaggcaccagactcctcccaaattatttcttgcatgagatccaagaaccctctcttgggatctgaatcaggacccctttccagtaacacctgcaggaagcacatcctggccccttccctgctccactgactggaggcacaggccaaggtccatggaggtgaaccacccagcacccctcagcctcttggaacttgcagcccacagcctgctgagcaatgaggcttcagttccactggtgttggaacagctcacagtgaaccttttcccgccactactcactgctgcatttgccaaggggcacagaaaggctctgaaggccttggtgcaggcctggcccttccggtttctccatctgggctctctgatagtgcagtggcccaaccaagacagcctgcaagctgtggtggatgggctggaggccttttctgcccacagggcttgtcccaggaagtcagaactgaggatgctggatttcaccctggactctgagcaagtcttttactgtggtaaaggggcttctgaagccttggccaagttcccattttggttaccatcagcagtcaaggcagagacgccccaggccacggccaggcccaagccagcaaagaacatgaaaaaaggatgaaagcagccatgggaagcagtggaaatacacattgatcttttcctatgaggcttcttcaagttagataagttcctctccgacctcctgacgaaagtggaacagagccacggggccctgcatctctgctgtaggaagttgcacattgagaagatggccgtcgacagtctgctgaggatcctgaagacactcaggctggatttcatccaggagctggaggtgttttactggtgtagagacttcttggtattggcagagccaaacctatctgccatacagctgggaaggatcttcaacctgcgcagcctcaagctcttctactacaagtgggccttctcctcatgggtcaggcggccctccagctacttcttctcccagctcaccatgctgggccacctccggaagctgcacctgtctcactcctacctcgtaggcaaactacattacatactcagctgtctgtgggtcccactacattccctggagatctgcaactgcaagcttctggacactgacatcacctacttgtcccggagccatcataccacctgcctgaagaagctggatctgagcgtcaacgacttgtcctacatgatccctgggcccttgggtaccctgctgagggcagtctcagggacactgcagcacctagacctgaaacactgctggctgaaggatgcccacctcagtgccctcctgcccgccctgtgccgctgctcccacctcagttccctgagcctctccgacaaccccatctccagtgcctgcctcctgagcctgctggagcacaccatggggctgatggagctgaagcaggtactctatcccatcccagttgactgctgcatctacctgcatggcgtctgccggggtcctgtgaacgaggacaagctgtgccagttgcaggccgagatacagaagcagctgcaagccatgcagcaggctgacatgcagtggagcccctccactgtctttgcttatgcagctggtgcagtttgaatgaagaacaggagccaggctcagggaacagaagtcagagagggcagctggaatcacagctgaggccacatgttgtttgcaaggaacataaaataaacttccatgggaact

SEQ ID NO: 4562 - DNA, 1994 bp, Homo sapiens
gtgacttgctccttcttgccttccatcatgactgtgaagcttccccagccatatggaattgtaagttcaattaaacttcttttctttgtaaattacccagtctcgggtatgtctttatcggcagcatgaaaacggactaatacagtaaattggtaccaggagtgggatgttctgaaaagatacctgaaaatgtggaaacgactttggaactgggtaataggcagaggttggaacagttttgagggctcagaaaaagacaggaaaatgtggaaaagcttggaactttctagagacttgttgaatggctttgccaaaaatgctgataatgatatggacaataagacccaggctgacgtggtctccgatggagctgaggaacttactgggaactggagcaaaggtgactcttgttatgttttagcaaagcgactggcagcattttgcccctgccctagagatgtgtggaactttgaacttgagagagatgatttagggtatctggcagaagaaatttctaagcagcaaagcattcaagaggtgacttgggtgctgttgaaagcattcagttttaaaaggaaaacagaggatagaagtttgaaaaatttgcagcctggcaatgcgatagaaaattgcattttctgaatagaaattcaagccagctgcagaaatttgcataaggaaggaggagccaaatgttaatccccaagacaatggggaaaatgtctccaggccatgtcagaggccttcacggcagtccctcccatcacaggcccagaagcctaggaggaaaaagtggtttcatgggctgggcccagggtccccaagctatgtgcagcctggggtttggtccactgcatcccagctgccccagctgtggctgaaaggggacaatgtagagctcgggccctggctttagatggtgcaagccccatgccttgtggtgttgagcttccatgtggtgttgagcctgcaggtgcacagaagtcaagaattggggttttggaacctccacctagatttcagaagatgtatggaaatgcctggatgcccaggcagaaatttgctgcaagggtggggctctcatggagaacctctgctagggcagtgcagaagggaaatgtggggtggatcccccacacagagtccctactggggcactgtcctccagacccagaatggtagatccactgacagcttgcactgtgtgcctggaaaagccacagacactcaatgccagcctatgaaagcaaccaggagggagactgtaccctgcaaagccacaggggcagagctgctcaagaccatgggaacctacctcttgtatcagcatgacctggatgtgagacatggagtcaaaggagaacattttggagctctaagatttgactgccctgctggattttggacttgcatggggcctgtagcccctttgttttggccagtttctcccatttggaatggctatatttacccaatgcctatacccccattgtatccaggaagtaactaacctgcttttgattttacaggctcataggtggaagggacttgccttgtctcagatgagactttagactgtggacttttgagttaatgctgaaatgagttaagactttgggggactgttagaaaggcatgattggttttgaaatgcgagatcatgagatttgggaggggccaggggcagaatgatatggtttggctgtgtccccatccgaatctcatcttgaatttctgtgtgttgtgggagggacaggtgggaggtcattgaatgatgggggcaagtcttttctgtactgttcttgtgatagtgaataagtctcatgagatctgatggttttaaaaagaggagtttccctgctcaagctctctctctttgcctgctgccatccatgtaagatgtgacttgctcctccttgccatctgccatgatgtgaggcttccccagccacgtggaactgtaagtccaattaaacctcttttctttgtaaatt

SEQ ID NO: 4563 - DNA, 2109 bp, Homo sapiens
gcagagcggggccggggactccgaggcgctgagctggggtgggggtcgggggctcctcccgtgtttactgggcgtccccagcagcgcacgaggcaggtccagagtctggtcctggcgggacagtaactagccgcagtaatagatggctaaattcattatattgaaagtgccctgaaggaagctcggctccggtacgagctagaagcggggcccagccagctcccaggaaacccgtccttggtccctggccttgctctgcgcctccccggtgctcccgccccctcaactcagtcagggtcctgccgaaggccagcccggatgaggccgggcgggtgccagggcgccacggcctgcgcgcctgggggttcccggagtcgccccaagccacccccgccctcaggccctcccgccccctgtcctgcaggagctgcacgcggccgaggtgcgcaggaacaaggagcagcgagaagagatgtcgggctaagggcccgggacgggcggcgcccatcctgcgacggaacacgttcgggttttggttttgtttcgttcacctctgtctagatgcaacttttgttcctcctcccccacccccgcccccagcttcatgcttctcttccgcactcagccgccctgccctgtcctcgtggtgagtcgctgaccacggcttcccctgcaggagccgccgggcgtgagacgcggtccctcggtgcagacaccaggccgggcgcggctgggtcccccgggggccctgtgagagaggtggtggtgaccgtggtaaacccagggcggtggcgtgggatcacgggtccttacgctgggctgtctggtcagcacgtgcaggtcagggcaggtcctctgagccggcgcccctggccagcaggcgaggctacagtacctgctgtctttccagggggaaggggctccccatgagggaggggcgacgggggaggggggtgatggtgcctgggagcctgcgtgtgcagccggtgcttgttgaactggcaggcgggtgggtgggggctgcagctttccttaatgtggttgcacaggggtcctctgagaccacctggcgtgaggtggacaccctgggccttcctggaagcctgcagttgggggcctgccctgagtctgctggggagtgggcattctctgccagggacccatgagcaggctgcatggtctagaggttgtgggcagcatggacagtcccccactcagaagtgcaagagttccaaagagcctctggcccaggcccctccccaccagggctttgcagatgtccttgaaagacccaccctagagccctttggagtgctggcccctcctgtgccctctgccctggtggaagcggcagccacaagtcctcctcagggagccccaagggggattttgtgggaccgctgcccacagatccaggtgttggaagggcagcgggtaaggttcccaagccagccccaacacccttcccacttggcacccagagggggctgtgggtggaggcctgactccaggcctctcctgcccacaccctctgggctgagttccttctttcccttggacgcccagtgctggccttggaggacggtcagctggaggatggcggtgggggaggctgtctttgtaccactgcagcatcccccacttctccacggaagccccatcccaaagctgctgcctggccccttgctgtaaagtgtgaagggggcggctgagttctcttaggacccagagccagggccctcaacttccatcctgcgggaggccttggccgggcactgccagtgtcttccagagccacacccagggaccacgggaggatcctgacccctgcagggctcaggggtcagcagggacccactgccccatctccctctccccaccaagacagccccagaaggagcagccagctgggatgggaacccaaggctgtccacatctggcttttgtgggactcagaaagggaagcagaactgagggctgggatattcctcatggtggcagcgctcatagcgaaagcctactgtaatatgcacccatctcatccacgtagtaaagtgaacttaaaaattcaatcaaatgaacaattaaataaacacctgtgtgtttaag

SEQ ID NO: 4564 - DNA, 1783 bp, Homo sapiens
aaaaagccgggggtactgggcctcaggtcaggcctatggccatggccttcacagacctgctggatgctctgggcagcatgggccgcttccagctcaaccacacagccctgctgctgctgccctgcggcctgctggcctgccacaacttcctgcagaacttcacggccgctgtccccccccaccactgccggggccctgccaaccacactgaggcctccaccaacgactcgggggcctggctgagggccaccatacccctggaccagcttggggcccctgagccctgccggcgcttcaccaagcctcagtgggccctgctgagccccaactcctccatcccgggcgcggccacggagggctgcaaggacggctgggtctataaccgcagtgttttcccgtccaccatcgtgatggagtgggatctggtgtgtgaggcccgcactctccgagacctggcgcagtccgtctacatggccggggtgctggtgggggctgccgtgtttggcagcttggcagacaggctgggctgcaagggccccctggtctggtcctacctgcagctggcagcttcgggggccgccacagcgtatttcagctccttcagtgcctattgcgtcttccggttcctgatgggcatgaccttctctggcatcatcctcaactccgtctccctggtggcttccagagtcatcccgctggctcctcctgcatggcaagtcccagttagctgtacagaatctgcagaaggtggctgcaatgaacgggaggaaggaggaaggggaaaggctgaccaaggaggtgatgagctcctacatccaaagcgagtttgcaagtgtctgcacctccaactcaatcttggacctcttccgaaccccggccacccgcaaggtcacatgctgtctcatggtgatttgcgtggcaggcagcgcagttccggctctggggagcaagggggctcctgcgaacccgagtccaggaatgggcgtcttcctgcggtagcccctgccggcctgggcttgcccttcgtccaccttcctctttccgcgagggagaaacagatcctgagttcaaaattccagagctgaaagtcctctcttggatccttctggaaacagtaagcaaaagcccgtttttgctgagaaagtgactcggcagctatccggagctctctgcctgcaggtggggccattctcctatggagccgacccgacccgctcaaagctgccccgggagccgcaggtttggttcgcgcacgccgggacttgccaaccgcacccggaaaatcggggccatgtccaaatgtttcgcttcgctgccggcagggagccgcgccgggctcgctcctgggatcaactgcacagtcctggctttggggagcgggaggcggtgagcctgcccgccccccggccccttcctcaccagtgtgtctggggtgaggtggggatggggagtcctggggttcgaaaaaggatgggggaggagaaagaggaagtgttaggaactggtgaactttcacaaacttccacaaaccctattgtaaatgccttcaattaactgggatttttttctttactggttgattgatttaagacaaggtcttgctcgggcaacagagcgagacagagtgtctcaagagaaaaaaaaaaaggattaatactctacctcttctgcttttgtttttttaataacttaatcacatctgtaaaaacttttacaacattacatgtaaccagcttccggcatgtgatagctttgcaataaatatttgatgagtgaatgaacc

SEQ ID NO: 4565 - DNA, 1687 bp, Homo sapiens
agttcaggggccgcgccgggccgagctgtcgcccgcgccacctccaccgccgccgctgctaccgccaccgccaccgcctgggctgcagcagatcgcgggagaacgtctgcgcgaagccccggtgcagccctggcgggaccgcagcaaccaccggagcgtgagcaacagcttcccggctggaggagccactgccccacgcgcccgcggcccgcgcgccgagatgttctacatttcaactccatcaaatattaaattgatgtttatgggctaacctggaaaccgaaaaacagtttgtttcactacaagaataagaaaatatgtccaaattcctgtcagctgacttataaagggacttttagaacacaacccaatgcatgaggtactccttaagccctgacaaccatcttgaagatggaatcatgaatatggcaaattttctacggggctttgaagaaaaggggataaagaacgacaggcctgaggaccagttgagcaaagagaaaaagaaaattcttttctccttctgtgaggtgtgcaacatccagctgaactctgcagcccaggctcaggtgcattccaacggcaaatcccaccgcaaacgagtgaagcagctgagtgatgggcagcccccaccacccgcccaggccagccccagcagcaacagcagcacaggcagtacatgccacactactacccttcctgctcttgtgcgcacacctaccctgatgatgcagccttcactggatatcaaaccatttatgtcttttccagtggacagtagttctgctgttgggctctttccaaattttaacacaatggatcctgtgcaaaaagcggttattaaccatacatttggagtatccattcccccaaagaagaaacaagttatttcttgtaatgtctgtcagcttcgctttaactcagatagccaggccgaggcccactacaaaggaagtaaacatgccaagaaggtcaaagcactagacgcaacgaaaaataaacccaaaatggttccttccaaggacagcgcaaaggctaatcccagctgctccatcactccaatcacaggcaacaactctgacaaatcagaagataaagggaagttaaaagccagcagttccagtcagccatcaagctctgaaagtggctcatttctcctcaaatctggcacaacacccctgccacctggagcagccacttctccctccaagagcacaaatggagctcccggtactgttgttgaatcagaagaagaaaaagccaaaaaattactttattgttcactatgcaaagtggctgtgaactccctgtcacagctagaggcacacaacacaggatctaaacacaagaccatggttgaagctcgtaatggggctggtccaattaaatcctatcctagacctggatcaagattaaagatgcagaatggcagtaaggggtcaggactacagaacaagacatttcattgtgaaatctgtgatgttcatgttaattcagaaattcaactcaaacagcacatttctagccgaaggcataaagatcgagttgcagggaaaccactgaagccaaaatacaccccttgcaaagtaatagggcttctgcctaagcctctccctccagccaataggcagctttcttaactatcctaacaagccttggaccaaatggaaataaagctttttgatgc

SEQ ID NO: 4566 - DNA, 3686 bp, Homo sapiens
ctgcctaataagttaaatgcaaatcagggtggttttgaaaatggtgagattggtgaatctgaggagaataatccacttgatgtccactcaatttatattgtcccttttcaatgtccaaagtgtgaaaagtgttttgaatcagagcagattctcaatgaacacagctgttttgctgctagaagtggcaaaattccaagcaggttcaaaagaagctacaactataaaaccattgttaaaaaaatcttggccaagcttaagcgtgctaggagtaaaaaattagataactttcaatctgagaaaaaagtatttaaaaagagtttcttgagaaattgtgatcttatttctggtgagcagagctctgaacaaacccagagaacatttgtgggttctcttggcaaacatggaacatataaaacaattggcaatagaaagaagaaaacattgactttgccattttcttggcaaaatatgggaaaaaatttgaaaggcatccttacgacagaaaacatattaagcattgataattcagtgaataagaaagacttgtcaatctgtggttcatcaggtgaggaattctttaataactgtgaggtacttcagtgtggtttttcagttccaagggaaaacatacgtactagacataagatatgtccttgtgacaaatgtgagaaggtatttccttctatatccaaactaaaaagacactatttaattcatactggacagaggccctttggctgtaatatttgtgggaaatcttttagacagtcagctcacttaaaaagacatgaacagactcataatgaaaagagtccttatgcatctctttgccaagtagaatttggaaacttcaacaatctttctaatcattcaggtaataatgttaactataatgcttcccaacaatgtcaggctcctggtgttcaaaaatacgaggtctcagagtcagatcaaatgtcaggagttaaggcagagtcacaggattttattcctggtagcaccgggcaaccctgtcttcctaatgtacttttggaatcagagcaaagcaatcctttttgcagttattcagagcatcaggagaaaaatgatgtcttcctgtaccgatgcagtgtttgtgctaaaagtttccgatctccatctaaactggaaagacactacctaattcatgcagggcagaaaccatttgaatgctcagtttgtggcaaaacattcagacaggctcctcactggaagagacatcagcttactcactttaaagaacgaccacaagggaaagtggttgccttagattcggttatgtaaattgtcgcaaccactaacaattgtggtctctggtgatcttatttttaaagcctgtattatttaaaatgcatttttattgaaaggcctgcattaaactgaatggtttcacaggcatttgcttgtcctgcatagtaaggaggtagaatacatagaaaattaatacaatgttttagaaacagccaagttaattttagaggcaagaacatgatttgatgctataaagtaggcattttaatattgtaaacatatactttggctgtattgaaaaatataaatccatgatggctgtacaaataatttagcctcattcattttttaaaggaattattccttaagacatgccatctctttttagatatactcaaaagactgagaggcaaaacttggcttttagctgcagcacatagccctgttatatttgatttattttacatttcatacgaaagcataattttgtccacatgcgactcaaattgcattggtaatttttttttttttttgtaagttaaaaaaactacagagacactaaaggtgaaaatggatgagacaattatagtattattttcattggtctttttttttgagatggagtctcactctttcgccaggctagagtgcagtggcgccatctaggctcactgcaacctccgcatcccagattccagcgattctcctgcctcagcctcctgagtagctgggattacaggtgcctgccatcacgcctggctaatttttgtatttttagtagagacgggggttcaccaagttggccaggatggtctcgatctcttgaccttgtgactcacccgcatcggcctcccaaagtgctgggattacaggcatgagccaccgcacccgacggtcttttcaaagctatttatttttaggactatgtggtaatttctccttcaggtgataaggattttttttttctcccagctagtgctatctttctcaaaataatttaaaagtaggcgagaggctaggatgtacctatatttaccatgtttacttaccaggaatattttctaagtgccatagtctttttcataatacgtatgagttttaccttttcagaggaataatttcaagtcatttatttgctcattaatgatagcagtagtcatagacttaagactattctagagatcttcatctccataagacttttacatttattttagtaaacttttctttctatgcctctttaatggagtggttctgttatttaagcctgttctaagtttgatcaaatggcaatgactaggtctagttttagtttttatttttgcaggagtctattgctaaagaattttattttgatccttgttaaatttttattttaattaataaggtagtcattcctgtagagggataagatgcttgtagagttgtgggtatcattccaaatagaactgttatgatttgggaaatattctttactacaaaggacttatttcataattacaaattttccttcatatttgcctttgtttataaaatcttcaggaatgacattctctagcaataaaaggaatgaaccgttatgtttctaagctgaaaagaggaacaggtgggtaattatcctgccatacttaaatatagtggaaaatcctctattgagaatgtggataaatgaacaattgtaagttttgcatcataaactgagaactttcttttgacaggggggaggcgggagggatagtaggtgggggtgatctgcttgcttcttttaccacaggtgatttttaagtaacttgggtttaatttacagagatgaaacatgacagtctgagtaaaatacccagtgatgtagaagtgtgcctgtttattatgtagatacagacatccagcaaaaacaggagaatcacatgctttaaagaacactttctcttaggtttccttgagatatgttcctccagtgcaagcaagataatggtttacagaatttgctttacacaaaacttgtcaagaactcatctgttaaaagcaaggaataactagtttatattttccaataatgttcaaggttttctccttaatatgtttgaaattattgattttggcatttttctaagcaatttatgtaattttatttgaagaaaatgttttgtataatgtttttcccagcctaaacagggagagtcctaacagtgttgtgcttgtatgattctgagactttatttgcgtaagtgatactactatactttatttttgacccatgcctttttaagctgtttcatattgaaaggtggaatattgtaaaaattttgtcaaagatgtactgtagtgctatttgaagtacctgtaacaaaacagttggccctctgtatccatgtactctgcatctgtggattaaaccaattgcagatcaaaaatattag

SEQ ID NO: 4567 - DNA, 3089 bp, Homo sapiens
ctttacggcaagggtacctacggtacctgaaaacgatggcatggaaaacacttcccatttacctgttgttgctgctgtctgttttcgtgattcagcaagtttcatctcaagagctttcctgtaaaggccgctgctttgagtccttcgagagagggagggagtgtgactgcgacgcccaatgtaagaagtatgacaagtgctgtcccgattatgagagtttctgtgcagaagtgcataatcccacatcaccaccatcttcaaagaaagcacctccaccttcaggagcatctcaaaccatcaaatcaacaaccaaacgttcacccaaaccaccaaacaagaagaagactaagaaagttatagaatcagaggaaataacagaagaacattctgtttctgaaaatcaagagtcctcctcctcctcctcctcttcctcttcttcttcaacaattcggaaaatcaagtcttccaaaaattcagctgctaatagagaattacagaagaaactcaaagtaaaagataacaagaagaacagaactaaaaagaaacctacccccaaaccaccagttgtagatgaagctggaagtggattggacaatggtgacttcaaggtcacaactcctgacacgtctaccacccaacacaataaagtcagcacatctcccaagatcacaacagcaaaaccaataaatcccagacccagtcttccacctaattctgatacatctaaagagacgtctttgacagtgaataaagagacaacagttgaaactaaagaaactactacaacaaataaacagacttcaactgatggaaaagagaagactacttccgctaaagagacacaaagtatagagaaaacatctgctaaagatttagcacccacatctaaagtgctggctaaacctacacccaaagctgaaactacaaccaaaggccctgctctcaccactcccaaggagcccacgcccaccactcccaaggagcctgcatctaccacacccaaagagcccacacctaccaccatcaagtctgcacccaccacccccaaggagcctgcacccaccaccaccaagtctgcacccaccactcccaaggagcctgcacccaccaccaccaaggagcctgcacccaccactcccaaggagcctgctccaactactcctgagacacctcctccaaccacttcagaggtctctactccaactaccaccaaggagcctaccactatccacaaaagccctgatgaatcaactcctgagctttctgcagaacccacaccaaaagctcttgaaaacagtcccaaggaacctggtgtacctacaactaagactcctgcagcgactaaacctgaaatgactacaacagctaaagacaagacaacagaaagagacttacgtactacacctgaaactacaactgctgcacctaagatgacaaaagagacagcaactacaacagaaaaaactaccgaatccaaaataacagctacaaccacacaagtaacatctaccacaactcaagataccacaccattcaaaattactactcttaaaacaactactcttgcacccaaagtaactacaacaaaaaagacaattactaccactgagattatgaacaaacctgaagaaacagctaaaccaaaagacagagctactaattctaaagcgacaactcctaaacctcaaaagccaaccaaagcacccaaaaaacccacttctaccaaaaagccaaaaacaatgcctagagtgagaaaaccaaagacgacaccaactccccgcaagatgacatcaacaatgccagaattgaaccctacctcaagaatagcagaagccatgctccaaaccaccaccagacctaaccaaactccaaactccaaactagttgaagtaaatccaaagagtgaagatgcaggtggtgctgaaggagaaacacctcatatgcttctcaggccccatgtgttcatgcctgaagttactcccgacatggattacttaccgagagtacccaatcaaggcattatcatcaatcccatgctttccgatgagaccaatatatgcaatggtaagccagtagatggactgactactttgcgcaatgggacattagttgcattccgaggtcattatttctggatgctaagtccattcagtccaccatctccagctcgcagaattactgaagtttggggtattccttcccccattgatactgtttttactaggtgcaactgtgaaggaaaaactttcttctttaaggattctcagtactggcgttttaccaatgatataaaagatgcagggtaccccaaaccaattttcaaaggatttggaggactaactggacaaatagtggcagcgctttcaacagctaaatataagaactggcctgaatctgtgtattttttcaagagaggtggcagcattcagcagtatatttataaacaggaacctgtacagaagtgccctggaagaaggcctgctctaaattatccagtgtatggagaaacgacacaggttaggagacgtcgctttgaacgtgctataggaccttctcaaacacacaccatcagaattcaatattcacctgccagactggcttatcaagacaaaggtgtccttcataatgaagttaaagtgagtatactgtggagaggacttccaaatgtggttacctcagctatatcactgcccaacatcagaaaacctgacggctatgattactatgccttttctaaagatcaatactataacattgatgtgcctagtagaacagcaagagcaattactactcgttctgggcagaccttatccaaagtctggtacaactgtccttagactgatgagcaaaggaggagtcaactaatgaagaaatgaataataaattttgacactgaaaaacattttattaataaagaatattgacatgagtataccagtttatatataaaaatgtttttaaacttgacaatcattacactaaaacagatttgataatcttattcacagttgttattgtttacagaccatttaattaatatttcctctgtttattcctcctctccctcccattgcatggctcacacctgt

SEQ ID NO: 4568 - DNA, 3859 bp, Homo sapiens
tagtgctttcctcgacgcgtgatccgagtgactccacggtgcacattcactgcagcatctctgtgtggcagtcctcagcctttaaacttgacggatgcatttaagttcacttcttagattctcaataattctgtccctagaagaaagccagcttccctctacaagtgctctgggaaaaggagagcaggttgaagtaacatttcctgtactgagacttgcaccctgtgatctctcactcatcccaaattctgcatgtggatggtaagtatcaaaaactttgcctatgccacataaaggaaacctcttaaattccttagatgaacattaggttcattttctaagaatgactgagataaaaccaaattattttggtctctgattattagtaacttcattcttgggattgcatgttttaaatcttaaagttggtaaacttgggcaatgatacgtaagtgtctttaataaaaggaattggatgatttttaagtttattaccaaagtctaggcagatctttgcctctgtgatacaactttttctttagaaagaggaaatggtgattggaatggcctagactttcccatctaccgctgtgctatacattacacatttaaagttaaccccagactaattttatttatttctgtgctcagtagaaatattattacatatttggcaacataaggaagtactgtttaactgtgattcaagaatatattacaattatgtttacttctcctccccaaaatgcttgagattagggggcaaccttgctttgaatggccttggccgttgcttgtctttgtctctgtgcagagctgcccctggagcagaatattccctgcttggtccaaaccacagagagtaagcagggtgggcatggaggctggacacggtgctcccggtgggtgcatggacctgaggcattttgaggcttccctggcttacctcgagcagagggagccctcagagctaagccagagccacatgacccattctgttgacgatggtcgttgggtgaaccgtggactggtgctggtggatgcccaggaggagcccagggtgctgcctggggcggagctggagaggggaggtctggaaagcaggttccagctgggggcctctgccaagtccatgtccagcctccctggagatggcttcccagtgtattaacagaccccgttggcattggtattaactctgccgcctcgggccagctactttcctcctggagttggttccttattcgcagaggtgggcagcttgtgtggccttcaagtctagtcactcggaggctacctgagcagtggccttggcccaggcactggcactgaccttttctgtaaccttagaagaaaatagaaaccacagaggtcagagcgagcgtcttcacagacattagcaggtgcccaggggatcaccacaaatgcgttggtggcacagatgtggccagcctggcacagatgtggttctcactggcaagaacctgccccggcccacgctctccactcctgcggagagctcacagccaggccagggggcgcacgtggggcccaacgcccacgctccccactcctgcggagagctcacagccaggccaaggggcgcacgtggggcccaacgcccacgctccccactcctgcggagagctcacagccaggccagggggcgcacgtggggcccaacgcccacactccccactcctgcggagagctcacagccaggccaaggggcgcacgtggggcccaacgcccacgctccccactcctgcggagagctcacagccaggccagggggcgcacgtggggcccaacgcccacactccccactcctgcggagagctcacagccaggccagggggcgcacgtggggcccaaccttcaggaataagattattgtgtattcttttctttttttccttaaatcagtctttcttctgagaacacccgatgtgtgtggatcggaagctcagtgggcttattcgtatttaacctggcaaacctggaagtggaagctgctttgtattacaaggatttccagagcctcagcatcctgctggccggatcgtgtgccctgaggaaccgcactgcggatcaaaaggtgctgtgcttgctggcctccctctttggcgggaagattgccgtgttggagatcaacccggccgcgctagtcagggctcagcagtgccccagcatggggcagagcctctcggtgccagccagctcctgtgtcctaccgacctctccactgtatctgggaattgccaaggagaagagtaccaaggctgctagtgaacagcgacgtgctgcacggaacgtcatgaaggaccaacgcctggttttccatagtaaagttaggtcatctggttatgcgtcagcaccacatgtaactatgttttcaccaaagaccaacatcaagagtgaggggaaaggatcttcaaggagcaggagcagctgcgcacgggaggcataccccgtggagtgcgctgtgcccaccaagcccggcccccaggtcgctgccgcccccacctgcacacgtgtatgctgcatccagtactcaggagatgggcagtggctggcctgtgggttggccaaccatctgttactcgtttttgatgccagcctgactgggacacctgctgtgttttcaggtcacgacggggcagtgaatgccgtgtgctggagccaggaccggaggtggctgctctctgcggcccgggacgggaccctgcgaatgtggtcggctcgtggggcagagctcgcactgcttctgatataaacagaagagcaagtccaagctgatttgcaggctctccacgacgggtgcagtagacatgaccagtttatcggcagtcaacgacttttattcccacatcgtactcgcagctggccggaacaggaccgtggaagtgtttgacctcaacgccggctgcagtgcagcggtgatagtggaagcccactcacggcctgtccatcaaatctgccaaaataaagtgtgagcgccactttgaagggcatccaacccgcggctatccatgtggaatcgctttcagtccttgtggacgattcgcggcttgtggggccgaggacagacacgcttacgtgtatgaaatgggctcaagcacgttttctcaccggctggctgggcacacagacactgtcactggagtggccttcaacccatcagcgccccagggggaagagaaaattgaaggagggtcaagggcgctgactccttcaatgccctggaagttgcttctcctggaggaaaggggcttgtagccatgtgggaacagtaacaatggctgctcgcctatttgcaccctctgtaagaagaagcatccatcgctgatcagagaacaggtccctgacatttggaggatgggtgctttctgcccatcctgggttctgcaggccctatggagaccacttttgaaagcttgccacagctaccttggatggtaaactccagctctttctagctgagtaaccactgacctgtgagctgggtccaggaatgctgtgaggaacaacttaaaagtaagaagtagtggttcatccatcagggggccagaagcagcaactgtttttcatattttgagacttgcctcagatttcccccgtttgcaagctcctcccctctgtgtgtgccatgtcagagttttatgtctttctgctcctcaaaagggatccccttcattgggaaaatggaaatggcgtccagtacttctgcacagaatttggtaaagttaaaacaaaatatctttcaataaaacataatatagtatttgtttgataattagagttggaagaaaaaagagagaatttcttttgggcagtgaaaataaagcagttaacagtc

SEQ ID NO: 4569 - DNA, 3003 bp, Homo sapiens
gaggccaggctgtgggagaccgagaaaatatgccagctggagcccgaggggcgtgtgagggtggacctcgtgctacggatggctgaagccctcttggcatgctgccctggggaccagaagcccgggatcctggcccggctgaaggacatcaaggcccaatgggaggagacagtcacctacatgactcactgtcacagccgcatcgagtgggtgtggctgcactggagcgagtacctgctggcccgagatgagttctaccgctggttccagaagatgatggtcacactggagccccacatcgagctccagctgggcctgaaggagaagcagtggcagctgagccacgcccaggtgctgctgcacaacgtggacaaccaggcggtgctcctggaccggctgctggaggaggcagcctccctgttcaacaggatcggggaccccagcgtggacgaagatgcccagaagagaatgaaggctgagtacgatgcagtgaaggccaaggcccagaagcgggtagatctgctggagcaggtggcccgggagcatgaggagtaccaggcaggtgtggacgagttccaactgtggctgaaggcggtggtggagaaggtgaatggctgcctggggcggaactgcaagctgcccatcacgcagcgcctctccacactgcaggacattgccaaagattttcccaggggcgaggagtctctggagacgctggaggagcagtctgcgggtgtcattcggaacacctctcctttgggtgcagagaagatcaccggagaactggaagagatgaggaaagttctggagaagctgcgcgccctctgggaggaggaggaggagcggctgcggggcctgctccggtccaggggagcctgggagcagcagattaagcagctggaggctgagctcagtgagttcaggatggtcctgcagaggctggcccaggagggcctgcagcctgcggcgaaagcggggaccgaggacgaactggtggcacactggagacgctactcggcaacacgggcggcgctggcctcggaggagccccgggtggaccggctgcaagcccagctgaaggagctcatcgtcttccctcacaacctgaagccgctctctgatagtgtcatcgctaccatccaggagtatcagagcctgaaggtgaagagcgcgaggctgcgcaatgccgcggcggtggagctgtggcagcatttccagcggcctctgcaggatctgcagctgtggaaggccctggcccagcggctcttggaggtcactgccagcctgccggacctgccttcccttcacaccttcctgccccagatcgaggcagccctgatggaaagctcccgcctgaaagagctgctgacgatgctgcagctgaagaaagacctcctgattggcatctttggccaggagagagccacggcactcctggagcaggtggcaggttccatgagggacagagacctgctgcataacagcctcctgcagaggaaaagcaaactgcagagcctgctcgctcagcacaaagactttggagcagcttttgagcccctgcagaggaagctcttggacctccaggtcagggtccaagccgagaaggggcttcagcgggaccttcctggaaaacaggcccagctctcaaggttgcaggggctgcaggaagaggggctggacttgggggcacagatggaggctgcaaggcctctggtccaggagaaccccaaccaccagcacaaaatggaccagctttcctccgacttccaggccctgcagaggtctctggaggaccttgtggacaggtgtcggcagagtgtgcaggagcactgcaccttcagccaccagctgctggagctgcggcagtggatcgttgtgaccatgcaaaagctggaggcacaccggggagaggcgggcccgggggatgccgagtcccaagaggccgagtttgagaggctggtggcagaattcccggagaaggaggcccagctgtccctggtggaagcgcagggctggctggtgatggagaagtcttctccggagggtgctgccgtggtgcaggaggagctcagggagctggcagagtcgtggcgggccttgaggctgctggaagaaagtctgctgagcctcatcagaaactggcatctgcagaggatggaagtggattcggggaagaaaatggttttcaccaacaacatcccaaagtcaggatttctcatcaatcccatggatcctattcccaggcatcgtcgacgcgaagaagaagggagccatgaagatttctcccagctcctgaggaactttgggcagtggttgcaggtggaaaactccaagctggttagaatcatcgcaatgagaacttctacagctgaggacttgaggaccagaaaatcgaagctgcaggagctggaggctcgggtgccagaaggtcagcatctctttgagaacctccttcgtctcgggccagcaagggggacctcggatgagctggaagatctgcgctaccagtggatgctgtacaagtccaagctgaaggactctggccacctgctgacacaaagttctccaggggagccgactggattccaaaagactcggcggtggcgaggactgggctccctcttccggagggcgtgctgtgtggcgctcccactgcagctgcttctgctgctgttcctcctcctgctgttcctgctcccaatcagggaagaggaccgcagctgcaccctggccaacaacttcgcccgctccttcacgctcatgctgcgctacaatggcccaccacccacctaacccactggggcacacaggtgactttctcctccaacctccatcagtcccagggcccctcctgaggatgctcgccagggaaactggaaacaggggcagggcaaagactgcagagctgcatccatatcagtgctgtgtcagcgttcccagaagacacttactttttatacagtgttgtcttagtctatttatactaaatgtgtactacatgtg

SEQ ID NO: 4570 - DNA, 2914 bp, Homo sapiens
gtggggtgttgggcacgcgtcggcctagcggatctgaacccaggtgatttctgttctcaggaagcttttaggtgacaaggatcaggcatgtgaacaaataaccatactgtaaagctggctgtgctgggtcgctagagcaaactcagacacacactctgcgctcttggagttgggaaacccacctgcgttggctttttgtgggaggtggccttgattgggccttgaaggatgggtgagatttacagaaggttggaatgaggcactccaagcaaagaacagcagaggctcagcagcaagaatgcaaagagggagttcactactgactcaaatacccggagccctggggtttagtctcctccctccacaagtcacatgtaaaagtccagtcatgctgggcgcggtggctcatgcctataatcctagcactttgggaggccgaggtgggcggatcatgaggtcagtagttcaagaacaacctggccaacacggtgaaaccctgtctctactaaaaatacaaaaattagtcgggcatggtggtgggcacctgcaatcccagctactcgagaggctgaggcaggagaatcacttgaaactggaaggcggaggttgcagtgagccgagatcatgccactgcattccagcctgggcgaaagagctaaactccgtctctcaaaaaaaaaaaaaaaaaaaagtccagtcatgtaattatgtaacagtcacgtgacctgttatggaacttccaatggcaactaaaagcacatgcagctagtggatttcatcggagtgtttgaggttcccgtcttgaatgtgactgtcggaactactgtccgggggggtggtgcatttttctgagtttaagcaggagtcgggagtccccaaaagggaacacaagacaccttgatcctggcatatcttgtgtgccctctgtgggcctcagtttgtttcacaggattgaaaacctgggaagttagatgctcatctcatctgaagaagttgttctgcctttgttaaggtggagcgggaatagtcagcactgggacatgagaatggacagtcgcctggacccacctagggattcaccatttgctaaatgtgtgagctgtgggctcggccctgggggcactttaggaacatgactagtcttcccctgcagtgtggaggacacatgtgccacagagcccagctttgtgctcggtgccagagaggcttccggaggcaggcagggctgcgtgcagcctggaaggatgagccaggccaggcgggaaacggaagtccaggtagaagggaggagccgaattggggtacactccatatgggctcaggcaggtcagcctgtggaatgaatagaggccaacatgcaggccagcccggaatgcggcaggagtgacagtggctttccgtttctgggaattctgccagtacctacagtggtgccttttgacttggcttaccttttttctcgacatgcaggcagcgtctatcccagactaccggggccctaatggagtgtggacactgcttcagaaagggagaagcgttagtgctgccgacctgagcgaggccgagccaaccctcacccacatgagcatcacccgtctgcatgagcagaagctggtgcagcatgtggtgtctcagaactgtgacgggctccacctgaggagtgggctgccgcgcacggccatctccgagctccacgggaacatgtacattgaaggagtacgtgcgggtgttcgatgtgacggagcgcactgccctccacagacaccagacaggccggacctgccacaagtgtgggacccagctgcgggacaccattgtgcactttggggagagggggacgttggggcagcctctgaactgggaagcggcgaccgaggctgccagcagagcagacaccatcctgtgtctagggtccagcctgaaggtacgtgccgatgacacaatgagtgaaccgagcccctgcccgcccgagggtgtccagctctgcggcccagcactgtacagacttgtcccttgtgtgtgtgcggtgtctgtctgtctgcttccacaggttctaaagaagtacccacgcctctggtgcatgaccaagccccctagccggcggccgaagctttacatcgtgaacctgcagtggaccccgaaggatgactgggctgccctgaagctacatgggaagtgtgatgacgtcatgcggctcctcatggccgagctgggcttggagatccccgcctatagcaggtggcaggatcccattttctcactggcgactcccctacgtgctggtgaagaaggcagccacagtcggaagtcgctgtgcagaagcagagaggaggccccgcctggggaccggggtgcaccgcttagctcggcccccatcctagggggctggtttggcaggggctgcacaaaacgcacaaaaaggaagaaagtgacgtaatcacgtgctcgatgaagaacagttggcactttgcagatggccagtgtcacggtgaaggctgggttgcccccacgggtctagggagaacgaactctttggggatgacattttcaccgtgacatttttagccatttgtccttgaggaagccccttgcactgctgcggttgtaccctgatacggcctggccatcgaggacacctgcccatccggcctctgtgtcaagaggtggcagccgcacctttctgtgagaacggaactcgggttatttcagccccggcctgcagagtggaagcgcccagcggcctttcctcgctcaccaggccagtctcagggcctcaccgtatttctactactacttaatgaaaaagtgtgaactttatagaatcctctctgtactggatgtgcggcagaggggtggctccgagcctcggctctatgcagacctttttatttctattaaacgtttctgcactggc

SEQ ID NO: 4571 - DNA, 3152 bp, Homo sapiens
ctccaaccccttagccaagcactgtagtttctggtagacggtggccacagagaaccgaaggtcaagctcccacccactggtgacccctggtatggggtcggcgcaggcgagcagagtggcagcgttcccgagtaaaccctgctcctgtccctttgccctcagagatcctgcctacctctagcctgaattgataccctcctcccttcctccacgattaatgaaactaatcagaagcagcagctgccacgtagggtcagccagaaaattacatcactggagggcaggccaaaccgagccagggtgggctgggacccggcatgactcacctgttcctcttcctccccggggcggcctggcagctgacaacgtgctcctgtccagcgatgggagccacgcagccctctgtgactttggccatgctgtgtgtcttcaacctgatggcctgggaaagtccttgctcacaggggactacatccctggcacagagacccacatggctccggaggtggtgctgggcaggagctgcgacgccaaggtggatgtctggagcagctgctgtatgatgctgcacatgctcaacggctgccacccctggactcagttcttccgagggccgctctgcctcaagattgccagcgagcctccgcctgtgagggagatcccaccctcctgcgcccctctcacagcccaggccatccaagaggggctgaggaaagagcccatccaccgcgtgtctgcagcggagctgggagggaaggtgaaccgggcactacagcaagtgggaggtctgaagagcccttggaggggagaatataaagaaccaagacatccaccgccaaatcaagccaattaccaccagaccctccatgcccagccgagagagctttcgccaagggccccagggccccggccagctgaggagacaacaggcagagcccctaagctccagcctcctctcccaccagagcccccagagccaaacaagtctcctcccttgactttgagcaaggaggagtctgggatgtgggaacccttacctctgtcctccctggagccagcccctgccagaaaccccagctcaccagagcggaaagcaaccgtcccggagcaggaactgcagcagctggaaatagaattattcctcaacagcctgtcccagccattttctctggaggagcaggagcaaattctctcgtgcctcagcatcgacagcctctccctgtcggatgacagtgagaagaacccatcaaaggcctctcaaagctcgcgggacaccctgagctcaggcgtacactcctggagcagccaggccgaggctcgaagctccagctggaacatggtgctggcccgggggcggcccaccgacaccccaagctatttcaatggtgtgaaagtccaaatacagtctcttaatggtgaacacctgcacatccgggagttccaccgggtcaaagtgggagacatcgccactggcatcagcagccagatcccagctgcagccttcagcttggtgaccaaagacgggcagcctgttcgctacgacatggaggtgccagactcgggcatcgacctgcagtgcacactggcccctgatggcagcttcgcctggagctggagggtcaagcatggccagctggagaacaggccctaaccctgccctccaccgccggctccacactgccggaagcagccttcctgctcggtgcacgatgctgccctgaaacacaggctcagccgttcccagggatctgccagcccccggctcagcagtgggaccagggcctcgcagcagcaaggtgggggcaagcagaatgcctcccaggatttcacacctgagccctgccccaccctgctgagaaaacactccgccacgtgaagagacagaggaggatggcaggagttacctcgggaaacaaacaggatcttctctgccctgctccagtcgagttggcctgacccgcttggatcagtgaccatttgctggcagacaggggagagcagcttccagcctgggtcagaaggggtgggcgagcccctcggcccctcaccctccaggctgctgtgagagtgtcaagtgtgtaagggcccaaactcaggttcagtgcagaaccaggtcagcaggtatgcccgcccgtaggttaagggggccctctaaaccccttgcctggcctcacctggccagctcaccccttttgggtgtaggggaaaagaatgcctgaccctgggaaggctccctggtagaatacaccacacttttcaggttgttgcaacacaggtcctgagttgacctctggttcagccaaggaccaaagaaggtgtgtaagtgaagtggttctcagtccccagacatgtgcccctttgctgctggctaccactcttccccagagcagcaggccccgagccccttcaggcccagcactgccccagactcgctggcactcagttccctcatctgtaaaggtgaagggtgatgcaggatatgcctgacaggaacagtctgtggatggacatgatcagtgctaaggaaagcagcagagagagacgctccggcgccccagccccactatcagtgtccagcgtgctggttccccagagcacagctcagcatcacactgacactcaccctgccctgcccctggccagagggtactgccgacggcactttgcactctgatgacctcaaagcactttcatggctgccctctggcagggcagggcagggcagtgacactgtaggagcatagcaagccaggagatggggtgaagggacacagtcttgagctgtccacatgcatgtgactcctcaaacctcttccagatttctctaagaatagcacccccttccccattgccccagcttagcctcttctcccaggggagctactcaggactcacgtagcattaaatcagctgtgaatcgtcagggggtgtctgctagcctcaacctcctggggcaggggacgccgagactccgtgggagaagctcattcccacatcttgccaagacagcctttgtccagctgtccacattgagtcagactgctcccagggagagagccccggcccccagcacataaagaaccgcagccttggtactgcagagtctgggttgtagagaactctttgtaagcaataaagtttggggtgatgac

SEQ ID NO: 4572 - DNA, 2421 bp, Homo sapiens
tttctatcgccgggagggcggttgaggcggtggtggcggcgagcgggcggccgggcgctggctgaggggcgctgaggcgggagctgtggcggcgctgggcgcccctggctcctcggcctctgccggccatgggctccgagaaggactccgagtcgccgcgctccacatcgctacatgcggccgcacccgaccctaagtgccgcagcggcggccggcgccggcgcctcctcagctgtccgcaccgctcgtgccgggactgcctccgccactacctgcgcctggagataagcgagagcagggtgcccatcagctgccccgagtgcagcgagcgactcaacccgcacgacatccgcttgctgctcgccgacccgccgcttatgcacaagtacgaggagttcatgctgcgccgctacctagcctcggaccccgactgccgctggtgcccggccccggactgcggttatgctgttattgcctatggctgtgccagctgcccgaagctaacttgtgagagggaaggttgccagactgagttctgctaccactgcaagcagatatggcatccaaatcagacatgcgatatggcccgtcaacagagggcccagactttacgagttcggaccaaacacacttcaggtctcagttatgggcaagaatctggaccagatgacatcaagccatgcccacgatgcagtgcatacattatcaagatgaatgatggaagctgtaatcacatgacctgtgcagtgtgtggctgtgaattctgttggctttgtatgaaagagatctcagacttgcattacctcagcccctctggctgtacattctggggcaagaagccatggagccgtaagaagaaaattctttggcagctgggcacgttgattggtgctccagtggggatttctctcattgctggcattgccattcctgccatggtcattggcattcctgtttatgttggaaggaagattcacagcaggtatgagggaaggaaaacctccaaacacaagaggaatttggctatcactggaggagtgactttgtcggtcattgcatccccagttattgctgcagttagtgttggtattggtgtccccattatgctggcatatgtttatggggttgtgcccatttctctttgtcgtggaggcggctgtggagttagcacagccaacggaaaaggagtgaaaattgaatttgatgaagatgatggtccaatcacagtggcagatgcctggagagccctcaagaatcccagcattggggaaagcagcattgaaggcctgactagtgtattgagcactagtggaagccctacagatggacttagtgttatgcaaggtccttacagcgaaacggccagcttcgcagccctctcagggggcacgctgagtggcggcattctctccagtggcaagggaaaatatagcaggttagaagttcaagccgatgtccaaaaggaaattttccccaaagacacagccagtcttggtgcaattagtgacaacgcaagcactcgtgctatggccggttccataatcagttcctacaacccacaggacaggtttagcatgatccatgcatgactcagcaaagtggattttgtctccacagagaatgcaacaatatggaaatccaagtggacattgaagccaaaccaagccactatcagctggtgagtggaagcagcacggaggactcgctccatgttcatgctcagatggcagagaatgaagaagaaggtagtggtggcggaggcagtgaagaggatcccccctgcagacaccaaagctgtgaacagaaagactgcctggccagcaaaccttgggacatcagcctggcccagcctgaaagcatccgcagtgacctagagagttctgatgcacagtcagacgatgtgccagacatcacctcagatgagtgtggctccccccgctcccatactgcagcctgcccctcgacccccagagcccaaggtgcaccgagcccaagtgcccatatgaacctctctgccctagccgagggacaaactgtcttgaagccagaaggtggagaagccagagtatgaagtggaatgaatgctcctgttctgagaagcacacttgtaactgcatcttttggaatttttttttttttttttccaaggggtagagatttatgtattttatttcacagattctctggtcacaggtttttgcccagggaaattctgagaaattcacaatttcttaccagataaaacatgaaaagtttgccgttagttcccctcccctcccctccctctttttagttttaatttattggttaaactgatggcagcaatccatgaggtgtgtcaaagagtgtacatatgtatgtgtgtatattgaatgctaaacatattactgaaagacacattttaataaagatttctgtcat

SEQ ID NO: 4573 - DNA, 2536 bp, Homo sapiens
ggaaccggagcctgagagccgggcgccgtgcgctcctccccgcgctgtctcggcggcccaggaattcactgtctgtagcatctgctcctccacagagggaccctggaatggcgatggcactcccgatgcctggacctcaggaggcggttgtgttcgaggatgtggctgtgtacttcacaaggatagagtggagttgcctggcccccgaccagcaggcactctacagggacgtgatgctggagaactatgggaacctggcctcactaggctttcttgttgccaaaccagcactgatctccctattggagcaaggagaggagccgggggccttgattctgcaggtggctgaacagagcgtggccaaagccagcctgtgcacagattccaggatggaggctgggatcatggagtctcctctgcagagaaagctctccaggcaggcaggactgccgggcaccgtgtgggggtgcctcccctgggggcaccctgtgggggggcaccctgcaccaccccacccgcatggcggtcctgaggacgggtcagataaacccacccacccccgggctcgggagcacagcgcctccccaagggttctgcaggaagacctgggccggcctgtggggagctcagccccccgctacaggtgcgtgtgcggcaaggcgttcagatacaactcgctgcttctcaggcaccagatcgtccacaccggcgccaagcccttccagtgcacagagtgcgggaaggccttcaagcaaagctccatcctgctgcggcaccagctgatccacactgaggagaagccgttccagtgcggcgagtgcgggaaggccttccggcagagcacgcagctggctgcccaccaccgcgtccacacccgcgagcggccctacgcatgcggcgagtgcggcaaggccttcagccgcagctcccggctgctgcagcaccagaagttccacaccggggagaagcccttcgcgtgcacagagtgcggcaaggcgttctgccgcaggttcaccctcaacgagcacggccgcatccacagcggggagcggccctaccggtgcctgcggtgtgggcagcgcttcatccgagggtcctcgctcctgaagcaccaccggctgcacgcgcaggagggtgcccaggacggcggcgcggggcagggcgccctgctcggagctgcgcagaggccccaggcgggggacccgccccacgagtgcccggtgtgcgggaggccgttccgacacaactccctgctgctgctgcacctgcgcctacacacgggcgagaagccgttcgagtgcgcggagtgcggcaaggccttcggtcgcaagtccaacctcactctgcaccagaagatccacaccaaggagaagcccttcgcgtgcaccgagtgcggcaaggcgttccgcaggagctacacgctgaacgagcactaccggctccacagcggcgagaggccataccggtgccgcgcctgcgggagggcctgcagccggctgtccaccctcatccagcaccagaaggtgcacggccgcgagcccggggaggacacagagggcaggcgggcgccctgttgggcttcctgatgacggggacgacaggccgaggattcacgctggaagcccacccaagccggcggggccctagcgcagaaattcagaaccccctgtcctgaaggatctctctgtcagccagcctggagtgcaatggcgcaatcatggcttactgcagcctccagctcccaggctcaagcgtttctcccaccttagcctcctgagtagctgggactaaggcacacacactgtacctggcagctggcgaagcattgtttctgagtgtgtgaggatgttttcagtggactcagtgaagatctgccctcagcgtgggcaggcacatccacttggttggggacccagatggaacacaaagggagaagacaagcaaattctcttttctggagggagacacccatctcctgcccttggacatcaggactccaggttcttcggcctttggactcaggcttgccacagaggcctcccagggctctcggccagtcagcctcagaatgagagttacaccactggcttccttggttcaaccaccttcttacctggactgagcctcacttacagcttctctaggtctccagcttgcagacagcctatgggaggacttctcagcctccataagtgtgtgggccagttcgcctaataaatcccctctcctggccgggcgcggtagctctcccctgtaatctcagcattttgggaggcagaggtaggtggatcacctgaggtcaggagttcaagaccagcctggccaacatggtgagacccccgtctctactaaaagtacaaaaagtagctgggtgtggtgctgggtgcctgtaatcccagctactcgggaggctgaagcaggagaatcacttcgacctgggaggtagaggttgcagtgagccgagatcgagccactgcactccagcctgggtgacagggcaagactctgtctcaaacaaataaaaatcccctctcct

SEQ ID NO: 4574 - DNA, 3253 bp, Homo sapiens
attacagttgccatgaagatacatggctttgatcaacattttcactgcctctcccctgacatgccgccttccccagcttccactgatcgtgagggtacccagatgctccacatctgctgtattcaactcatctcctcatacccagggtgatcaaactgctcactctctctcaacaatcccaccatgacttccttccactaccaccatccttactaccttttgcctgagggatatcatttattcagcaaggatttattgagtgccgactacatacaggctgtgttaagtacagtggaaagagatgaactgtagagttacctggacctggtttgaatctttgttctgcatttactagctgagtgcccttggataggccaccttgcctccaggagcttcggtttgtgaaggtttgtgacagtgtgtgtacaacacttcatctacagttggtcctcgagaagtggcagcagtccccatttttatcagacacataaagacacctttcttattagacacaaaagaaatggaacacaaaatgtccatacctcagaagagaaaatctggttgagatgaccttaatatgagctagaacaaagaattaaaagaacagtataaaggcaagtcacaaataagcacaaaagtgttaacagtaagtgctataggagtttatgccaaaagatccgcatgcactgggaatttgtcaaaaaacattaatttgtgctgcattttaagaaaggtgtagacttcagttctgaaaggggtggggtggaggatgggaagacgttctaggctgagaagatcttgaagcaggaaaggggaggagagcagcttggctgaagtggaaggtccatgcctgggagaaagaaagttggactagggtggggtgagcctcagatgcagctagaacctgttttatcttcaaataatagggtgctgggctgggcactgtggctcatgcctgtaatcccagcgactcaggaagctggggtgggagaactgcttgaggccaggatttcaagaccagcctgggcaacacagcgagaccccatctctgaaaaagtaagaaatattagctgggcatgttggtgcacacccatagtcacagctgcttgggaggctgaggtaagaggatcacttgggcccaggtgtttgaggctgcaatgagtcattatcgtcccattgcactccagcctgggagacagagcaagaccctgactcaattaaaaataaataaataggagctattgatggttcttgagtagaaaagtaaagagtgccacaatgaaggtgaaagcagtatcacagtgtgataagtagacaggggtctggagtcaatggactgatagaagaaactgggagtacctctgattgtggaagtccacgtgtgatggaatcaaggctcaggccagacaggaacccaaattatctgcttaaatgattcacgaatgagaatcactttgggagctttaaagatgagaacacgtttgtgggccttgcccctatttgtgcattttctcaacgtttcccaggagctgatgatgcagcacaggcgtgggagctttaaactagtccaactcttacacaaagggcaaattttcttagcggactaagaaacgtaactcaaagaggttaagtgactgaaccaaagtcacactcctagttagtgacagaggagaacctaagttggaccctcccgtctggaccccgggctccttcctctaggctggaccattgcagcacccgacaggggcaacactccagcggaatcccctgcaacctgcccttaggctgaggcttccctagagggccttccctgtttctccagagccagtgttcactagttccccagaccctgtaaactccatcgtggtcttcctaaatgggacttctcctcaggctgtccagcaggaaagaagggagtagcaggaatacgtgggtaccctggttccgtggccactagaggtaaggtgggctgggggtaggggttagagagcaagagaagcagcccaggtgagatgtcaaagatcaagttttcaaggccaccagggaaggaggctctagtcctaaggttaaagtcagccagggctcagtttgggaagctcaggtgtgtggtgagaaagctgctgagctgcggccagtttgcagtaccaaggagagctgctggaccagagatggagactgaggtcccagaaaggcactgctggagcaggaagatctgggccagccaccaaagggatgtgaacctggagcgaagcaggaggactgaaacttgggcaaccttcctcttcaggggtgctggagggctcctgggcacatccaggccggggaagaagcccccgggagccgtgtggtgttcacacgcatcacaggttcaggagaatgcaggagggggcctgagaagagctgcggatttggtcactcccgggaagcgttaggtagagtggagagcagagccagaccgcggggctccaggaagtggagatcctgtggttaaatagacgttgccgcacgtggagctcaatagacaattcttgttttgactttccaggagaggagtggatgattcggaaggtgaaggtggaggacgaagatcaggaggcagaagaggaggtcgaatggccccagcatctatcgttacttcccagcccctttcccgcgcctgacctggggcatctggctgccgcgtacaaactggagccaggggccccgggggcactgagtgggctcgcgctgtctgggtggggtccgatgccggagaagccctacggctgcggggagtgtgagcggcgcttccgggaccagctgacgttgcgactgcaccagcggctgcaccggggcgagggcccctgcgcctgccccagcctggtccgctccccccgaggtggcgccgcccccgctcttcttctgagcctagttctcacgaggaccctttcttgcccacagtttcgagaggcccgtgccatgagaccgcctggggtgagcaaggcgacctgggctgctgcccgaaggtttggccgccgcgggacacctgtttccttcccgcagtgtctgcgtccgcacagcatacccagctcggacctcctaggacagagactcagcgaacccttgctgggaaccgctgagctgaagttcttggaaggctcccacccaggtgccccgttggaaagcagatatttcccggacccagcgcggcctcaaccagggcaggaaagagtggttatttatgtacttaaagtttcattaaagttaaaatcgg

SEQ ID NO: 4575 - DNA, 2411 bp, Homo sapiens
acttccggtctccggggtcgacgacatagcgggtcgtatttttatccaaaagaaggacctggaggaggatgagagcgttactgctgcacacctaaagtcaaggaacaggagcattgggaatatgtgattcattgagactgctgcttgtatattaagaaaatgagtgaggggctcaaatgatctaggacagaaattctttcttttgaaatcgacagatataattgtatgtatttatcatgtgcaacatgaagttttatggggagaagcccgaggaagattgaccagttttgtaattctagcaacatggtccatggatcagtgacattcagggatgtggccattgacttctctcaggaggagtgggagtgcctgcagcctgatcagaggaccttgtacagggatgtgatgttggagaactacagccacctgatctcactgggaagttccatttctaaaccagatgtaattacgttactagagcaagagaaagagccctggatggttgtaaggaaagaaacaagcagacggtatccagatttggagttaaaatatggacctgagaaagtatctccagaaaatgatacctctgaagtaaatttacccaaacagatttcttcattggcttccaaaccatcttttacagctattcatattcaaaggagaatccattgcagaatctgcattgcatttggttatctctctttagtgtattgtagcctggaaatcctatgaatgtaggcgctcaaattttgttgcaagatttaatagagtgaaaacagagctcccatacaaaggggggggacccaaagagggtagtcgttgccggctcgaatgcctgggtttatatcctgatcattgtccctcccgctgtgctctcaggcaatagatgattggctatttctttacctcctgtttttgcctaattagcattttagcgggctctctttcttacctgatgggtcgggtgtgagctgagttgcaagccccgtgtttaaaggtggatgtggtcaacttcccatctaggcttagggattcttaatcggcctaggaaatccagctagtcctgtttctcagtaccccctctcaacaggaaaacccaagtgctgttggggaggttggccaacaactgctctaattgcttcctgctgaattggggtgtagtaggggttgtgcagttgagatttcctctggaggggtgccttcgatgtcattaacattggagcatgggctagcaggccggtccaggggtccgcggtagattttagtcatggactgcatctggggctccatttgaagaacgagttgtggctttacagcttcgattctggaaaagacaaacttaacaaggaggttaaagatacagagattgaaatgtatggcctgcagtgcaggggattatttctttggcacacttcacaggccctgactatctgcttgatagttttgaaaaggcctggtccatctcctcattcttaaaaaatgagattgaattttgattagcccaggaaaattgtctatgtgtttagatttctttctttatagtgtcatttagtgttgttctctttgttgcatattctgtacaagggaatttgagtccagaggctctgttaggtcagattaaacattttggggaagaatactttgtaggctatttgtatggcatatttcactgtcagaaaacatttaagtacaggtccttgcattagtgaaactaagtttgatcatttgggtaagctggtaaccgccataagtccattgtaaagatctaatttgtagtgcataaataatctatggagagactttgacctctgaatatttataatcatgtgtattttagctgtggattgaatacaaaatgaaaattgaaatagactattcaaaaatgaatgccgttaaggttgtcaacataagtcaacttgtgtgataaggctgacagtatattcagtacaaaattagcaccctctagtttattcagggagccaagattattttgtctggaaccttgtttttgttcagcatttatcatcagcacctatacatcatggctggtatgtgagctgttgataaactttgaaaaaaattaagcctttaaatcaagctataaaacatgataccattgtggcatcatgaattagagagattaacttttttaaagatcaataataatcctttgtgattttattccagtgcatttaaaaatctataaaatgataatttatattgatagctttcttctttttgtgaatatatccttatcagattattatgcttttgatagactacttaattctatttcttaacatttaattgtatctataatcataggtaaagttataattttctaaacatttttcaggttttgttaatgcagtgatcttataaatcttacaaaacgaaaaaaaaaaaaaaag

SEQ ID NO: 4576 - DNA, 2002 bp, Homo sapiens
gggagggaatcacagtcactgggaatcgtctgggaactctggcagtgacttatgtagaggccatcaacagtggagcagtgccttgtctggagaatgcagtgataactctggcccagcgtgagaactcagcggccgtgcagagggcatctgactactacagccagcagatggcccagcgagtgaagttccccacagacacgctccaggagctgctggacgtgcatgcggcctgtgagagggaagccattgcaatcttcatggagcactccttcaaggatgaaaatcaggaattccagaagaagttcatggaaaccacaatgaataagaagggggatttcttgctgcagaatgaagagtcatctgttcaatactgccaggctaaactcaatgagctctcaaagggactaatggagagtatctcagcaggaagtttctctgttcctggagggcacaagctctacatggaaacaaaggaaaggattgaacaggactattggcaagttcccaggaaaggagtaaaggcaaaagaggtcttccagaggttcctggagtcacagatggtgatagaggaatccatcttgcagtcagataaagccctcactgatagagagaaggcagtagcagtggatcgggccaagaaggaggcagctgagaaggaacaggaacttttaaaacagaaattacaggagcagcagcaacagatggaggctcaagttaagagtcgcaaggaaaacatagcccaactgaaggagaagctgcagatggagagagaacacctactgagagagcagattatgatgttggagcacacgcagaaggtccaaaatgattggcttcatgaaggatttaagaagaagtatgaggagatgaatgcagagataagtcaatttaaacgtatgattgatactacaaaaaatgatgatactccctggattgcacgaaccttggacaaccttgccgatgagctaactgcaatattgtctgctcctgctaaattaattggtcatggtgtcaaaggtgtgagctcactctttaaaaagcataagctccccttttaaggatattatagattgtacatatatgctttggactatttttgatctgtatgtttttcattttcattcagcaagtttttttttttttttcagagtcttactctgttgcccaggctggagtacagtggtgcaatctcagctcactgcaacctctgcctcctgggttcaagagattcacctgcctcagccccctagtagctgggattataggtgtacaccaccacacccagctaatttttgtatttttagtagagatggggtttcactatgttggccaggctggtctcgaactcttgacctcaaatgatccacccgcctcggcctcccaaagtgctgggtttacaggcatgagccaccatgcccagccctcatttagcaaagttttaaacataaaaagtgcttattagaggatatcagtgcctggcccacatgagagaacagatccatacacactttgaaaaactttgttcacttttaggaaatataattttgaaaaatcatttacatacaagaggtccactgaggcattgcttttaatggcaaaatattgcaatgtacttgaatgtccttcacattagattggtaagataaattttagtatgtgcatgtactggaatattatatagccagtaaacaaattgacaatgaagctctatttgtaccagtaaagaatggtcttgaagagacattgtaaaatgaaaaaaaaaaaaccaagttgtaaagcaatgtagattatcttatcagcatggaaaaaatgcaattattatatggaagcatgcaaatatatctctggaaagattaatcaaaatctattattattggctccttctgggaagaaccaagtgaatgtaggggttgaaggaacacatactcttcactttatactcttgaattttgtaaagaaatcttattttaccgattcagaaataaataagaaaatgtaagag

SEQ ID NO: 4577 - DNA, 5266 bp, Homo sapiens
ctttttccactcagcccctcaatattgttagttacttggcttactctgtttatttactgcagaaccttgagacagccctaattaagtccactctggagcccaccctgtgtgctctttgacttcagcaattgctagatcagtgtacacatcctatttttattatattcagggccacagctgactgcctggcccactggcttatggcaatgatgaagcagaccttcaggttatgacatcagtgcttgaccaagccacacaatcgcatcaatttttccaccaaaactggagaaacttgtctaaacaatttcaacttacccagaggctggctaaacaaattatcctgcaatgccgagattgccagctcacaggcacataccctccttcaaccctagaggatgggaacctaataagttatggcaaacagacgttacacacatccctgaatttggaaaacttagatacgtacatgtatccattgatttaattagtgcaaatgcccttcctggagagtctactggatatgtcactaaacatcttcttttaacttttgcatttatggggcaacccacaaaaattaaaactaataatgatctagcttatgccagctcacaatttcaacaattttgtcacatgtggaacatccaacattccacaggcatcccgtataacccccaaggacaagccatagtagaatgtgcccactccacccttaaaaatatgctcaaaaaacaaaaaaggggagtatgggtaaggaccctgcagcattattggcacaagccttatttacccttaatttttaaaatttagatgacaaatttcagtccattgtagaaaagcactttgctaaaacctctcaagacataaaactgcagttttatggaaatatgtgaacagtaatgtatgatgtggtccaaatgaattgttaacttggggaagaggatatgcttgtgttcacaccccctcaggtcctctttggattccagcacgacgcatcaaaccataccatgacgtgactaggacccaacctagaaatgaaggaactgaccctacaggactcacaaccctggataatgcagtgtcctcggacggcaacaagctctggacattacctgggggatgctgaaggcggcaactgaggaggctgaatgaatcctgctccagacacagacaccattcactccagataatttgttgcttgctatgctctctgttgtacattgcaactcgcatagggtattgatacttcatatgctcttgctttgtctgcaacctgtacctggtgcactctattgggctcatattttagatccacctttctttcaccctgtcacctgggcagacacctccttctcagcctttaataacataactgcttggctaggagggatagatttacccccagtggggtccctcattaatggcacacattaaactaaggtgccaggtaacactacatatcattccactatcctcccactgtgtgtaagttataaaggttctaaccctgtgtacctgcccaaacacaattatggctacatcatggcaaaggagatgccttaacattcctagctgcaggtagcctcaaaccgggcgatgcaatcaatgccactttcccaaacattccttcctgtgttaaagaacaaagccgggaaagtaatggattccactttagctgggaggtctgtcatggggaataagcccatatgctccagttaggcaattataacatcttagactggagcccccacagccacttgcagggcagccttactaatgtcctcatccatcatggcaccaatcacagtttcatagccacgtcccattcccctatgatttgggcctatggggggataggatattccagaccccaagtaaagtccatgccaccccaagacactttgtggtgcctgggacatcttagcacctcctttgacacctggcattggacatatcataattccagtcacaactatactacaacctttattcataatcacactgatcagtgcctgatttgcactacccatccatatgttttccttgtgggaactaatatttctgttataccccaaaactccatgtttgtgacccaggtgcagggacagccttggttcacctcatgtattactaattacaatatatctaattataaatattactagagtcgtggtattaaggagacaatctgaggcattcccaccagtcaatttgacatacggttggcaaggttcctcttcccttcccactttagatcgtgccctgtcccaggtcagacccgaaagattcataggcacacttacagccttcatagtctcagccatagtcatcctagcaactgctagtgtggctgtagcatctattactgaatcagtacaaacagctgcttttgtagataatttggccagaaatgtttctaatgaacttctcttacagcaaggtatagatcaaaagattcttgcacatctgcaagccctcgaggctgcctttggaatatgtgggggagcgacaagatgcactggcattccaacagcaattaaactgtgactgggagcataaacatatctgtgtcacttctctaccatggaatcagtcaatgcatagttgggatgaggtgaaacaacacctctggggaacctttcatgacaatttaacagcagacataaggcaacttaaaaatacaattttagaatcccttcaaactgtagatctacacacccaacaaacagccatatggaagggtgtgtgagattatctctcctggatagaccaccgctcctgggggcggggggtggtgggtcactccttgattagaaaagaatgttgctaattatactcatgtttgtcttatgttatttactaattttaggatgcaaagccggaataagagcaatgaccaccatgcctgacagacctgttgctgcgcacacctgtactctccaatgaacaagactgaatgcaaaaaaaacagaaaatggggagatttaggggatcagtcagtgtggttggaaaattgtaagatgaagttacaggatatagacacaaaccttcttggaaggccagaaggtttgcatagcttcagtaaaggatttggctgaaatcctttttacctctaatcccctttaccttgagttgatagcaatagagcaaataacatgggaatgtgggggagtttatctgaatagcttgtttactcatgtggtcctaagaccaacctttgattatccgcaggtgcatgattgctctctacctgggggcagggggagttaattacccacaggtgtgttgactcaaagcctttgtcattaagtctgtgctgaataaatgccatgagggccagccagttaaggcctgtggccgccacaactctttctgtgcatggcccggccccttagctgctctgtcactgaatatcggtgtgagtatgttattcatctgctgtgcggctggggtctgcaggacagacccctgcagctggggaaggaggcatgggactctgggaaagggaggcagtcatttaggcctggagccaaggggccaggggcctgggtaggcaacagagccacacagtgaccttgctaccctatttatgggccagccaccacctgccctcatgcccagggtctttctgcaggtggagctgaagagccaggaggctcagagtctgcagcagcagcaggaccagtacctgggtcatctgcagcagtatgtggccacctatcagcagcaggtggtcacctatcagcagctgacctctgaggaggaggagctgcacaaccagttactgctgcagacccagctcgtggaccggctgcagcagcagaaagctcaaagcaaagctgtggccaagatgggctgccaagagttgcgggagacccaggagcacctggaagctatcagccagcagaaccagcagcctcaggcccagttgagcctcatggctctccctggggaaggtaccggagactgctcacaggaagaggagagagccccaggaggaaacgggaactgttagcagcataggattgaggagctgaaacagacttttagaacagctggtcattatgccaaccaggagatggacagtgaggaggaggaggaggtgcctcagcccatgccaagcatcccggaggatctagagagccagaaggccatggtggcatttttcaactcagctgtagctagtgccgaggaggagcaggcacggctatgtgggcagctgaaggagtgcactgccagcgcctggctcatctgttggcctcggcccagaaggaacctgaggcagcagccccagccccaagaactgggggtgatcccatgtgtggggagacccaccaggccctgcagggggccatggagaagctgtggagccgctttatggagctcatgcaggagagaaggtggacttgaaggagagggttgaggaactggaacattgctgcatctagctgtctggagagagacagacaccatcggggagtgggaagccagggcacggcaaagagagctgcacattggtcagaggggccccagcgtctgagtcctgtcctcctgcaggagagtacatcgcactgtaccagagccagagggcagtgcggaaggaggaggagtgcatcagcaggctggcccaggacaagggagaggtgaaggtgaagctgctggagctggcgtggcttgtggacgactgcaacaagtggcatagcagattcctggcagctgcccagaaccctgctgatgagcccactccaggggcccccgccccccagtagcttggggctactgacaagccagggtagtgagtagagtcctcaggcacagtgggcacgcaggagcaggggagggctcccacagcaccctgcctccctctctccaaagatctttgtgaggtgagccttgccagcagtggggagtctgcacaaggagaggcggggaagcattctccctgtgacaaccccactgagcagcagatcatgcaactgcttcatgagatgcagaacctccaggagcacccaggcttgggcagcagcccttgcattccttttttgtaccagactgatgagaacaatgaggtgaagatcaccatcatctaaaagccggccactgtcagcaaaacctggggaagtggggctggaggctctgcccctaccatgtccctaccaccccttcccagtcaaccctttaccctcacagtagcaagcataagacccctgtctaatgtggggagacaggtggagatgaggtgaagatcaccataatctaaaaggccact

SEQ ID NO: 4578 - DNA, 2513 bp, Homo sapiens
aagtagcaaccgagcgagcctttctcgcgtcccagcaacgcgcccttccctctgccgggcctattctccctggtgcccctcccttcctcgaggctgcagctcacccctcattgggtctctcgttggtcaggagggcgcgggtctgcacactctcactcggtgccggacatcagttcctgcggctcttgctgtgggagctgcccgagagccagagcagtggggagggacggcgagaaccaatgtttaagtttatttaagaaagaagaaaaagagtcaagaagttcaagattttcgtcactcttatttttaaggcacatccaaagctccgtggagaaggggctggagggtgggaaaattatttttgtgcacattccatataagaaagaagagacccatcgaacattcagtacggagtcacctggaaattggagatgttggatacgatcgcccgtgccctgcaggacctgggcaggcaggtgctgcccactctgccctcgctgagccaggaggaagtctctattatctgggggaatgtatcagaatttgtgagacggcagttaaccctgcacaagggggttcagattccagcatttggaactttcactttcataagacaaaagcttgaggtgggaaacaacaaatttatcttaatccagaggcctgtgtttatcatggtggggaagctagtgcagatccatggactcaaacaaaacaaaaggcctggcactgtggactcggtgttgtctagcagagaggccttgaggaagtggcccagcagtgtgcttgcgtttccaaggattgagctcaaggagatggaaaacaaactgcctatggagacccttgtagaagaatgtggagagaatagagaaaggaagtgcaagttaaaagaccagtcagacaaagaagaaggcaccagagatatctcatcacccaaaagacttcgagatagacaagctttgttccctgccaaagtgacaaatgtcagcttgctggaaaagtttgaacgaagtgagagtggtgggaagattatgacccctgaaagcttatcatatccaagttgtctgaaacacgacagtgagatgaagccccaaacatctccagcttgccaggatcataacaaggcaggacaggaaatgtgctatgtatgtttgcaacgagcacaacgaaattccctgttgtactacagtgaggaaaggaggagagagatagaagatgagagactcatacagcagtatcagatgttaaaggatcaggaggctctcttcagacaccagatgaaaagtctggctactagagaacagaatcagaaaaatgctgcctataatcttggagttgctgaagctataagaaaccacaagaatgagaaaccggaattttataaatccttcctatttgacaaacggccactcagtcctgcgcttaatgctcttaagcaagaggaatattcccggagtctcctgaaacaaatggataacagacaggaaaacgaaataaagcaaagacaatacagagagttgatggaccgcctggaacaagtgcaactcacagaggaacttgctgcgcaaagagcgaaatttttaaaagataagatggaagaaacacagtgttacaagagagctttggatgcacagataaagaacaaaccctctcggctgcccccctttgagccagactcctctgagcccatctttggtaagaatgagggtgaactgatggtggaaaagcaaaagcgagaacaaaattacatgaaacaccagctggaggcagctgctaaccacaagaggaaagccatcctgcatcaactagtggaccagaggcgggatttgcaaatgcttcagaggacacaaagagagcacttggcagacagaaccgctgagctggagcgagtaaatagagtcaaccaatgcttacaggaggactgggaaaggagtgctgcgatgaagaagcagcgagacctggaggacaaggcttttgaacgggcttcagacaagctgtttctcctagaccagtgtgagaagtatcggcgctgcaagcaatgccagaggcgcacctccaacgtgggcgagagcaacctgtggcccctgaacaagttcctgcctggctcccggttgcttgtgtaaaactcaaagtttggctcttcgtttcccggggaaagtttttatcttttacatgtttgggggtgattgtgaaactgcgtatttttacctcagagaaaaaaatcattgtttaggtttggtgctttcattagattgcttgttaagcccttattgaattcactcctgctttcctcccacccccaattatttcctatactagtttctgatggcagtgaaggtgtctgaatggtcctgagggctagaacctgctgcacaggggctgggaatgggatccagcttcattatggctgctggggtgctgctgacccagccctgctgctgctccatgactttgtgtacaaaacttttttcatctgtaatgaatagtggcaataataaatattttttaagcgcctg

SEQ ID NO: 4579 - DNA, 2214 bp, Homo sapiens
aaaaaagttggaaacacctggggccactaccgaggtaggctgctcctcccaagaaagtgagaccgaaagagctcccgtggaagcggtcaaagcaggggcggggcgaacctgtgacatgcccctcggaagaacaggcttttagagagtcgccaggctccctgccctcatccgagatggcggcctgagggcgctctagccgacgctcttcggatgcccggagggggcggtggccttgcctctggctctgaggcggcggcgccgggcgctgcgaaggctcggccgctgtagtcagtggtgtggggtgcgcaagggcacggacctcggagctctccccgcttgcgccgagtttctcagcgccttccccacccaaaccggggtctcgcagtcggaagcactcagagtgcagccccgcgcggggccggtcgtaaccgcgccgcgggccggacgatgcccaagaagctgctgctgttgcccccgccctccgcgtcctcggctttccgcgtcccgcgcgcccgccccgttcccccgccggccatgaacgccgctcgcaccggctaccgagtcttctcggccaactccacggccgcctgcacggagctggccaagcgcatcacagagcgccttggtgctgaattggggaagtctgttgtatatcaagagaccaatggagaaacaagagttgaaataaaagaatctgttcgtggccaagatattttcattatacagacaatacccagagatgtgaatacagctgtgatggagttgctcatcatggcttacgcactgaagactgcctgtgccaggaacattattggggtcattccctacttcccctacagcaagcagagcaagatgaggaagaggggttccattgtgtgcaagctgctagcatccatgctggcgaaagcaggtttaactcacattatcactatggatcttcatcaaaaggaaatacaaggctttttcagctttcctgtggacaaccttagagcctcacctttcctgcttcagtatatccaggaagaaattccaaattacagaaatgcagtcattgtagctaagtctcctgatgctgcaaagagggcccagtcctatgcggagagactgcgtctgggtttggccgtcattcacggggaagctcagtgcacggaactggacatggacgatggtcgtcactccccgcctatggtcaaaaatgctactgtgcacccaggcctggagttgccattgatgatggccaaagagaagccaccgataactgtagttggagatgttggaggccgcatcgcaatcatcgtggattacattattgacgatgtggagagttttgttgctgccgcggagatcctgaaagagagaggcgcctataagatctatgttatggccacccacggcatcctgtctgcagaggcccctcgcctgattgaggagtcctccgtagacgaggttgtggtgacgaatactgtccctcatgaggttcagaagctgcagtgtcccaagataaagactgtggatatcagtttgattctttctgaagccattcggagaatccacaatggagagtccatggcctaccttttccgaaacatcactgtggatgactagctttcacgagggtctcgaccctggacctcctgagggaaacatggaaaaagcagtgccatgagtgatacagtgtttccttgcaagggaggactcgaaacagcctggagttagatatcttcttttgcccggattgatggggaggagggattaaaagagtcaggaagaagacagagctaatggataaatatcataacatggccttacatgtctgctgtcatcagccctgttccttaaaagttctagctgctttcttaaaaataatctgaaaatcttattgatactaaagaggagttaaaggcacataaagtcttaactctataatgttcatttagttgtttcagctccagggaaatggaggtattgatgttgaacctggttagggaagctgagcgcctgtggccctattactatccagttggcctctcccaaatcaacttcaagtcttttatagagaatcgtatttttctttcagaaattgttatgcctacagccattgaaaaatgaagcattcatgttgttacatcttccaaggatgtcagattagaaaatagcatcccacctctgggtatctgagtggctctgaagttgcaaataaaataatttgttgtc

SEQ ID NO: 4580 - DNA, 2309 bp, Homo sapiens
aataaaaggaacgagggtctggcgaagacaggagtgttcctctgaaacctcggggcccctggcaccggagcttagtttctggcggattggaggcagaatgacatttgcactgaagtgctgaaaaagatcgggggcgggggctttggtgagatctacgaggccatggacctgctgaccagggagaatgtggccctcaaggtggagtcagcccagcagcccaagcaggtcctcaagatggaggtggccgtgctcaagaagttgcaagggaaggaccatgtgtgcaggttcattggctgtggcaggaacgagaagtttaactatgtagtgatgcagctccagggccggaacctggccgacctgcgccgtagccagccgcgaggcaccttcacgctgagcaccacattgcggctgggcaagcagatcttggagtccatcgaggccatccactctgtgggcttcctgcaccgtgacatcaagccttcaaactttgccatgggcaggctgccctccacctacaggaagtgctatatgctggacttcgggctggcccggcagtacaccaacaccacgggggatgtgcggccccctcggaatgtggccgggtttcgaggaacggttcgctatgcctcagtcaatgcccacaagaaccgggagatgggccgccacgacgacctgtggtccctcttctacatgctggtggagtttgcagtgggccagctgccctggaggaagatcaaggacaaggaacaggtagggatgatcaaggagaagtatgagcaccggatgctgctgaagcacatgccgtcagagttccacctcttcctggaccacattgccagcctcgactacttcaccaagcccgactaccagttgatcatgtcagtgtttgagaacagcatgaaggagaggggcattgccgagaatgaggcctttgactgggagaaggcaggcaccgatgccctcctgtccacgagcacctctaccccgccccagcagaacacccggcagacggcagccatgtttggggtggtcaatgtgacgccagtgcctggggacctgctccgggagaacaccgaggatgtgctacagggagagcacctgagtgaccaggagaatgcacccccaattctgcccgggaggccctctgaggggctgggccccagtccccaccttgtcccccaccccgggggtcctgaggctgaagtctgggaggggacagatgtcaaccggaacaaactccggatcaacatcggcaaaagcccctgtgtggaggaggaacagagccgaggcatgggggtccccagctccccagtgcgtgcccccccagactcccccacaaccccagtccgttctctgcgctaccggagggtgaacagccctgagtcagaaaggctgtccacggcggacgggcgagtggagctacctgagaggaggtcacggatggatctgcctggctcgccctcgcgccaggcctgctcctctcagccagcccagatgctgtcagtggacacaggccacgctgaccgacaggccagtggccgcatggacgtgtcagcctctgtggagcaggaggccctgagcaacgccttccgctcggtgccgctggctgaggaggaggatttcgacagcaaagagtgggtcatcatcgacaaggagacggagctcaaggacttccctccaggggctgagcccagcacatcgggcaccacggatgaggagcccgaggagctgcggccactgcccgaggagggcgaagagcggcggcggctgggggcagagcccttcccactcacccctgcactcgggaccccgccctcgacggagagagtcggaccccacaggcccacagagacagttggaggaggacagactctcggggcactccctcccgcggtacagccccctgcgacgactggcgtcctccgtgttctcctcctccacgctggagacggagcattaccctcaccccggcggcggcggctcctcgggctcctccggttccctcattcagcgcagccgctcggctgagagcagccctgtgcgggcgccccaccggcgccacgcgcccctcgctgctggcaaccgcagactcatgccctcggtgctccgcatctcgcggtcccagctgcagcaggtgtgggcccggttcacccacaagacctaggctgggccccccccctcctggagggggcaggtgggggggggtggggagcaggcagaggaccatggttccttcccaggacgcaataatcacacactcacacatcccatcccaccccatcatgcaatacagcccccctagaacgttg

SEQ ID NO: 4581 - DNA, 1848 bp, Homo sapiens
acattgtcaaatgttccctcaggggttgagcagggggatagcaatcactgtgtagaggcagttagaataatattacacctgctgtgatttaagtgagctcaggccctggggaccagggctgaatcctggagggagcagcctccaggccaaggcctgaatctaattgaggttttttttgattgctaaaaccaggtttcttttaaagtctggcaacctctacagtgcttaaaatgagagggtttatttgaatcatgattctgtgatactagagctggaagggaccctaaaacccaatgtcttcaaccccttcctggttcagagaggaaagtaggagcgacagggctagaattcaggactcccacctcccagctcagctcactgtccccacacgccgtccacatagacacagttgccacgtttgattcaacttctctatggtgacttggttactcagagccccttttgtggtgggacccactgtgaccttagctgcccattatgttcctagggcttcgggtctcacctgtgaattgatggcatcctttaaccggtgctttgcaatctctctctttagtccgcaaccatccctctgttcatgcgaaacaaagatgtcgctgcagaagcggtcacaggtagtggcaaaacactcgcttttgtcatccccatcctggaaattcttctgagaagagaagagaagttaaaaaagagtcagtgggaacatcattgtggccactccaggccgcttggaggacatgttccggaggaaggccgaaggcttggatctggccagctgtgtgcgatccctggatgtcctggtgttggatgaggcagacagacttctggacatggggtttgaggcaagcatcaacaccattctggagtttttgccaaagcagaggagaacaggccttttctctgccactcagacgcaggaagtggagaacctggtgagagcgggcctccggaaccctgtccgggtctcagtgaaggagaagggcgtggcagccagcagtgcccagaagaccccctcccgcctggaaaactactacatggtatgcaaggcagatgagaaatttaatcagctggtccattttcttcgcaatcataagcaggagaaacacctggtcttcttcagcacctgtgcctgtgtggaatactatgggaaggctctggaagtgctggtgaagggcgtgaagattatgtgcattcacggaaagatgaaatataaacgcaataagatcttcatggagttccgcaaattgcaaagtgggattttagtgtgcactgatgtgatggcccggggaattgatattcctgaagtcaactgggttttgcagtatgaccctcccagcaatgcaagtgccttcgtgcatcgctgcggtcgcacagctcgcattggccacgggggcagcgctctggtgttcctcctgcccatggaagagtcgtacatcaatttccttgcaattagccaaaaagtaagctgccgtccgttttcagatagaatgcctagtgacggggtagctggaaaagttctccagcatgtggtcagcaattgaaattacgaattgcaaactcactggggctgggctggtggtggcagtggggggccctggtggggtttttttttttttttttttgagacggagtttcactcttgttgcccaggctggagtgcaatggcactatctcggttcaccgcaacctccacctcccgggttcaatggattctcctgcctcagcctcccagcactttgggaggctgaggcaggaggatcacttgagcccaggagttcaagaccagcctgggaacacagcgagaccctctcattaaaaacaacaaaacaaaac

SEQ ID NO: 4582 - DNA, 2433 bp, Homo sapiens
tatgttgtgatttgtgtaggggtggctttggtgagctcatcctggcattttaaaaataatgtgaatggtgtatccctttgtgatcatcatcactttttccctgcgagtcccaatcaatgcgggtgtgactgctgtatgaagtctcaggaagcccaccccagtggagaagaaggcttgcaggaggcaggagatgctgtccgatgaccacgtgaatgaaatcatcatacagaagttaatcgcatcccttatacccatgacatccagagacagaattaaagccatcaggaaccagccaaggaccatggaagagaaaaggaaccttagcaggggaggcctcacaatcacgacagaggacgaaggaagagcaaaggcacatcttacgtggtggaaaatagttgacaaagaaaaaagcaaacagactcatcgtatccttcagctcaattgctgtattcagtgtctgaactccatttcccgggcttatcggagatccaagaacagcctgtcggaaattctgaattccatcagcctgtggcagaagacgctgaagatcattggaggcaagtttggaaccagcgtcctctcctatttcaactttctgagatggcttttgaagttcaacattttctcattcatcctgaacttcagcttcatcataatccctcagtttaccgtggccaaaaagaacaccctccagttcactgggctggagtttttcactggggtgggttattttagggacacagtgatgtactatggcttttacaccaattccaccatccagcacgggaacagcggggcatcctacaacatgcagctggcctacatcttcacaatcggagcatgcttgaccacctgcttcttcagtttgctgttcagcatggccaagtatttccggaacaacttcattaatccccacatttactccggagggatcaccaagctgatcttttgctgggacttcactgtcactcatgaaaaagctgtgaagctaaaacagaagaatcttagcactgagataagggagaacctgtcagagctccgtcaggagaattccaagttgacgttcaatcagctgctgacccgcttctctgcctacatggtagcctgggttgtctctacaggagtggccatagcctgctgtgcagccgtttattacctggctgagtacaacttagagttcctgaagacacacagtaaccctggggcggtgctgttactgcctttcgttgtgtcctgcattaatctggccgtgccatgcatctactccatgttcaggcttgtggagaggtacgagatgccacggcacgaagtctacgttctcctgatccgaaacatctttttgaaaatatcaatcattggcattctttgttactattggctcaacaccgtggccctgtctggtgaagagtgttggggaaccctcattggccaggacatctaccggctccttctgatggattttgtgttctctttagtcaattccttcctgggggagtttctgaggagaatcattgggatgcaactgatcacaagtcttggccttcaggagtttgacattgccaggaacgttctagaactgatctatgcacaaactctggtgtggattggcatcttcttccgccccctgctgccctttatccaaatgattatgcttttcatcatgttctactccaaaaatatcagcctgatgatgaatttccagcctccgagcaaagcctggcgggcctcacagatgatgactttcttcatcttcttgctctttttcccatccttcaccggggtcttgtgcaccctggccatcaccatctggagattgaagccttcagctgactgtggcccttttcgaggtctgcctctcttcattcactccatctacagctggatcgacaccctaagtacacggcctggctacctgtgggttgtttggatctatcggaacctcattggaagtgtgcacttctttttcatcctcaccctcattgtgctaatcatcacctatctttactggcagatcacagagggaaggaagattatgataaggctgctccatgagcagatcattaatgagggcaaagataaaatgttcctgatagaaaaattgatcaagctgcaggatatggagaagaaagcaaaccccagctcacttgttctggaaaggagagaggtggagcaacaaggcttttgcatttgggggaacatgatggcagtcttgacttgcgatctagaagatcagttcaagaaggcaatccaagggcctgatgactcttttggtaaccagacaccaatcaaataaggggaggagatgaaaatggaatgatttcttccatgccacctgtgcctttaggaactgcccagaagaaaatccaaggctttagccaggagcggaaactgactaccatgtaattatcaaagtaaaattgggcattccatgct

SEQ ID NO: 4583 - DNA, 3010 bp, Homo sapiens
tcttggattccccccaacctctcaatcctgagaccactaccacgtactcaactctgggtacccccttcaacatgccaaaagtggaaagagccacagccatccagcccttggggaaactcttctgagaaagagatctgtatgaaagacagttagccccatatcaagtgaaaggagtccctagatctgatctagacactaccccaccttggaagttcttcaggaataccccgctcgctgcccacttttcccaactccctcctacccttctgacctctaaccaggttcctctgcacacccacatacacactcccaggagcatgaatgcatgcggatcaagatcctgggggactgttactactgtgtctctgggctgccactctcactgccagaccatgccatcaactgcgtgcgcatgggcctggacatgtgccgggccatcaggtcagctcaggcggtggtcaagaggaatgctgagggtggatgtggggggcagcaggcagctgacagaagtcctctttgtgagaatctggggtgtctcacaggcagggctgagggtaggactcagattgtcccacacacacactgctcaggaaactgcgggcagccactggcgtggacatcaacatgcgtgtgggcgtgcactcaggcagcgtactgtgtggagtcatcgggctgcagaagtggcagtacgacgtttggtcacatgatgtcacactggctaaccacatggaggcaggcggtgtaccagggcgagtgcacatcacaggggctaccctggccctgctggcaggggcttatgctgtggaggacgcaggcatggagcatcgggacccctaccttcgggagctaggggagcctacctatctggtcatcgatccacgggcagaggaggaggatgagaagggcactgcaggaggcttgctgtcctcgcttgagggcctcaagatgcgtccatcactgctgatgacccgttacctggagtcctggggcgcagccaagccttttgcccacctgagccacggagacagccctgtgtccacctccacccctctcccgagaaagagccctccagctcacctcagagaagatacaagatccctacagacaccattgtagggaccagccccacagggtcggtgggtctctccctgtgtgcgacgacgagagagtgtagaaataaagacacaagacaaagagataagagaaaaggcagctgggcccgggggaccactaccaccaatgcgcggagaccggtagtggccccgaatgtcgggctgcgctgttatttattggatacaaggcagaaggggcaaggtaaagaatgagaagaccctggcttccttcagcacccagtggagcctggatcggtgaggaggtctcaaagtctttgccagtggggctgtctggatgaccccctccatcctccctgggggtctgctcctgctttgcccagacgctctgagggtctctgtggtgatggacttggctctcactgtgcaggagccgtaccccccggggactagatgatgaactggacaccggggatgccaagttcttccaggtcattgagcagctcaactcgcagaaacagtggaagcagtcgaaggacttcaacccactgacactgtacttcagagagaaggagatggagaaagagtaccgactctctgcaatccccgccttcaaatactatgaagcctgcaccttcctggtttttctctccaacttcatcatccagatgctagtgacaaacagttcttcttcccaacatcatcagactgccctttccaagctcccaatgtgtcctccatgatttccaacctctcctgggagctccctgggtctctgcctctcatcagtgtcccatactccatgcactgctgcacgctgggcttcctctcctgctccctctttctgcacatgagcttcgagctgaagctgctgctgctcctgctgtggctggcggcatcctgctccctcttcctgcactcccatgcctggctgtcggaatgcctcatcgtccgcctctatctgggccccttggactccaggcccggagtgctgaaggagcccaaactgatgggtgctatctccttcttcatcttcttcttcaccctccttgtcctggctcgccagaatgagtactactgccgcctggacttcctgtggaagaagaagctgaggcaggagagggaggagacagagacgatggagaacctgactcggctgctcttggagaacgtgctccctgcacacgtggccccccagttcattggccagaaccggcgcaacgagtctcctgttcccccaggatctctaccaccagtcctatgaatgcgtttgtgtcctcttcgcctcagtcccagacttcaaggagttctactctgaatccaacatcaatcatgagggcctagagtgtctgaggctgctcaatgagataattgctgattttgatgagctgctctccaagcccaagttcagtggggtggagaagatcaagaccatcggcagcacctacatggcagccacaggcttaaatgccacctctggacaggatgcacaacaggatgctgaacggagctgcagccaccttggcactatggtggaatttgccgtggccctggggtctaagctggacgtcatcaacaagcattcattcaacaacttccgcctgcgagtggggttgaaccatggacccgtagtagctggagttattggggcccagaagccgcaatatgacatttggggcaacacagtgaacgtggccagccgcatggagagtacaggagtccttggcaaaatccaagtgactgaggagacagcatgggccctacagtccctgggctacacctgctacagccggggtgtcatcaaggtgaaaggcaaagggcagctctgcacctacttcctgaacacagacttgacacgaactggacctccttcagctaccctaggctgagattgcactcgccttctaagaacctcaataaagagactctggggtgtctgg

SEQ ID NO: 4584 - DNA, 1827 bp, Homo sapiens
tttagcttcaccacttcaaagaatttttcctggtgtccaaaccaacatttctaggaaatatgggaatgattttttgcaactttcgttacctacacaagacgagaaaacacatattagggaaaaaccttacataggtaatgagtgtggcaaagccttcagagtgtcttcaagtcttattaatcatcagatgatacatactacagagaaaccttacagatgcaatgagtctggtaaagcctttcatcggggctcactactaacagtacatcagatagtccatacaagagggaaaccataccaatgtgatgtatgtggcaggatcttcagacaaaattcagatcttgtaaatcaccggagaagtcacactggagacaaaccctacatatgtaatgaatgtggcaagtcctttagtaaaagttcccaccttgcagttcatcagagaattcatactggagagaaaccttacaaatgtaatcgatgtgggaagtgctttagtcaaagttcctctcttgcaactcatcagacagttcatactggagacaaaccctacaaatgtaatgaatgtggcaaaacctttaaacggaactcaagcctcactgcacatcatataatccatgcaggaaagaaaccatatacatgtgatgtatgtggcaaggtcttttatcagaattcacaacttgtaaggcaccagataattcatactggagagacaccttacaaatgtaatgaatgtggcaaggtcttctttcaacgttcacgtcttgcagggcaccggagaattcatactggagagaaaccctacaaatgtaatgaatgtggcaaggtcttcagtcaacattcacatcttgcagtgcatcagagagttcatactggagagaaaccttacaaatgtaatgaatgtggcaaagcctttaattggggctcattactaactgtacatcagagaattcataccggagagaaaccttacaaatgtaatgtgtgtggcaaggtctttaattacggtggatacctttcggttcatatgagatgtcatactggagagaaacctctccattgtaataaatgtggcatggtcttcacttactattcatgcctagcacgtcatcaaagaatgcataccggagagaaaccttacaaatgtaatgtgtgtggcaaggtcttcattgacagtggaaacctttcaattcataggcgaagtcataccggagagaaacctttccagtgtaacgaatgcggcaaggtcttcagttactactcatgcctagcacgtcatcggaaaattcataccggagagaaaccttataaatgtaatgattgtggcaaagcctatactcagcgttcaagcctcactaaacatctggtaattcatactggagagaacccttaccactgtaatgaatttggtgaggcttttatccaaagttcaaaacttgcaagatatcacagaaatcctactggggagaaaccacacaaatgtagtgaatgtggtagaacttttagtcataaaacaagtctggtgtaccatcagagaagacatactggagagatgccatacaaatgtattgaatgtgggaaagtctttaactccactacaaccctggcaaggcatcggagaattcatactggagagaaaccttacaaatgtaatgaatgtggcaaggtcttccgttatcgctcaggcctcgcacgtcattggagtattcatactggagagaaaccttacaaatgtaatgagtgtggcaaagcctttagagtacgttcaattctgcttaatcatcagatgatgcatactggagagaaaccttataaatgtaatgaatgtgg

SEQ ID NO: 4585 - DNA, 1919 bp, Homo sapiens
agatgcaggggccatggcactcttaacaccccagggagtgaaagaagtcttccaatttcagagaccacaaggtcgggagcgcctgcggaggcttctgaactgggaggagtttgacgaacagagagactcccggaggagcatcctgctggacaccctctacgagagcatcatctttgcagtgggcaaaggcttcccatgggtggaggtggcccaggtggtcaagttcacagaagagctgctaagggaaaccaaaggttcagtccaggagcccacacagcccaccagctgtgtaggaatgccagcagaggcctgatgatggcaatgacggtgacaatggcattacttattgagtgtttactgtgtaccaggcactgtggaaagcaccacatatgcatgctgtcgcctaatctcacgaggtagagatttttattgcctctattttacagaaactactactgacttctaacatcatagttgggccagttttaataaatggaataaaaaagacaaagaaagagaacactgatgcccagagaggccaaataacttctgcaagtgatgaagttgtgcagcctgaggttagcctgcatctgcctgaatccccagtctgtgctcataccagacataccctactgcccctgacagaggagccgagcttcaaggaatggccccagcatcagtgccatcttcagtcccatcttcagtccaggtgttccctaggcgcaatggtggctgctgtgtgaccgtgaatggtggctgagaacagaacacacagctattgaatccttggtgcccaagtcacagggcaggaggatgatgcatctccagccagcgtggtcctcctttggccagtccgggcccatcctgatgaggtcaggagggatgcagctgctcctcctcccccatgggagtgtcaggcccaaccagcctgccctctctcctctccctgcagtttaccaggtggctttggaaaggggtcaccctgaagggaccacttgtgctgcagtaggaggtgggaagatcaacagaccacggaccccgggacaggcaggagccacagaagaggtctcaagcaaaggtggcaagctctcagggctcttcctgacaatcctgcctgtccccaggccgtggacagcaggtcagccacaaagctaactcccaagaacagcacctggcccagtctccttccctggctcctccgttcccttccctgggcagacagtgccccagccaagctttcacagacatttctgacctatcaaaaagcaccagggctggggcaatgaaaagaaatagacaccaatcccttccctacacagggagtggtgatggggaaggcagctctaccaccaggttcccgacccctcacacctgggctgaagctcaggtcctgactttgccacaggttagctttaggcaagtctcatcctttttctgggcctcagtttccccatttgtagagaaaaacgattgtacaagctcaacatttctccttggtccagagagatgtgctccttggtccagagagactacttgccccaaatagatttgagaagcattgcaaacgctccatgccttttggtgatctgctaagctcatttgcatattttgttgagctcattagcatattaaagctctatttaatctccctggatccaacatctcttaaagggtctctctggctgtgaaacattcattttgatatacaggtgactcttgaagagcacgagatttagggccgccaacctcctgtgcggttgaaaacccatgtgtaactttggactcttccagaatttacttactcatagcctaccgttgaccagaagcttactgataatataaacagtcgattcccatacattttgtatgtaatatgtattatgtactgtgttcttacaataaagtaggctgaagaaaag

SEQ ID NO: 4586 - DNA, 2184 bp, Homo sapiens
attttggtgcaaataaagaacgcaggagccttgtctcctactgggctgtcagtgaggaaaaggaggaaagacaggttagctggggatgatgacggatctgaagcaaagccattcagtgaggctgaatgatggacccttcatgccagtgctgggatttggcacttatgctcctgatcatactcccaaaagccaggctgccgaggccaccaaagtggctattgacgtaggcttccgccatattgattcagcatacttataccaaaatgaggaggaggttggacaggccatttgggagaagatcgctgatggtaccgtcaagagagaggaaatattctacaccatcaagctttgggctactttctttcgggcagaattggttcacccggccctagaaaggtcactgaagaaacttggaccggactatgtagatctcttcattattcatgtaccatttgctatgaagggttcttcctgagagaggcagatttgagtgaggtgcataggattgccaaaactttccctgggaaagaattactgccaaaggatgccagtggagagattattttagaaactgtggagctttgtgacacttgggaggccctggagaagtgcaaagaagcaggtttaaccaggtccattggggtgtccaatttcaatcacaagctgctggaactcatcctcaacaagccagggctcaagtacaagcccacctgcaaccagggtggatcccgactgcccacatctcttggaggagccgatcttgaaatccattgccaagaaacacagtggaagcccaggccaggtcgccctgcgctaccagctgcagcggggagtggtggtgctggccaagagcttctctcaggagagaatcaaagagaacttccagatttttgactttgagttgactccagaggacatgaaagccattgatggcctcaacagaaatctccgatatgataagttacaattgtaagtgatgcttgtagattctctcacaggctgttttctgtagtatgcagggaaatggggaacacatcttccctacatcaggaagacaggcccaaattcaggcatggggtgaaataggagatgccctgtagccttcagaccagaggtttcctccaggactcaatctctgacccagcagaaatgtgtctgtaagtgaaactgccaatgtctgcaccattgtgaatccaattcttgaaggcccttactatctgtgcctgggtctagcactcagggcccactgcctatgagtctagaaggctcagtgtgtaggacctacaaacctataggggcccatcataacgttctctttaatttatattaaaatcagaagaaaaatgaatacaataataatgcatatgtaataatgactccatccagctctatctttgtgtttacatcatggcaatggaaacacaatttaagtattaatacaggatgggcccatgaaggcaaaggtgcctgtctcctagggaagccttaatgtggtattccctcttcaggataccaactatttctgcaaaaatttatgtctttcttggccctctttacctaccacaactcccatttcctcagctatataatctcaccatgctgaattgtgaatgaattatgagattaatagaccctcaaatgctagtgactgaggtgtcaatagcctttaccaagataagatcctttggagtttctctggatcctcaaggcatgactcttactccagtgtcatctttgtccacctgaagtccacctctggagagcccaacatcccttgactttggtttatttataaacgtgacgttccagttgctcaactactgcaggatctcaggactaaggagacagaaggctaaatagagaggagtttagaggaaagtttagaagcaggggaaatacaattttggttgccagagtaaagactcagtctccaaaaaagatctgaagaatcctcctttatgtaaaaccacaccaagattctgagaggaaacattttcaatgagaaaaatgtgggaagtaacttttctgtacccagaggctaagtataagtctgtgatctgccttatgagactgtgaatgcattgtcttactcatgtctgtggccctgtgtcaatatgactcctggcacatttaactgcttagaaggtactctttaatgtcacccaattaaaaagaacaaattgt

SEQ ID NO: 4587 - DNA, 1946 bp, Homo sapiens
tttatcttcagggaaaaaaattgattggctctctctgaggcaatcctgtgtcctcatggctgaaagccataattccctctcaactattactttttccttcagcccacaaagggaagctaagaataacatgcgccatcagtctgggttccttttaacaggataccctgtttaaaaagctggggcagggaagagatgagtaaagagtcctaatgagttgcctatttgttgaatcacaggtcacagggaatttgaattctgaccccttgcttgaactctgccagtgtcccctctgccagctagactgcgggagccgggagcagttgattgctcacgtgtaccaggtatggatgggggagctgtgtgctctggaacacaagtgtgggcagcttgtctgtagcccagatcctggtttggcctttgtctctctctggctcctgaaggagtcttgggttgtcgcttctattaagattcgtcttagggaggctgggcgcagtggctcacgcctgtaatcccagcactgtgggaagccgaggcgggtagatcacttgaactcctgacctcgtgatccacctgcctcggcctcccaaagtgttgggattacaggcatgagccactgtgcctggctcccactgttccttaagtcagccacatgtcccagaacgtaggcagagctcaagctaatgaaatctaagcagtggtctaaatggccagggcctctaatgtaagagactgacttttctaggggctaaacagaatacttggaagttccttattctgagactaaagaaaggggacatttcccaaaagtcatttctaagtgggtgcagattgtcctggaggtagcgcaagactgacagatcaaggctctgttttacagcacactgcagcagtggtgagcgccaagagctacatgtgtcctgtctgtggccgggcccttagctccccggggtcattgggtcgccacctcttaatccactcggaggaccagcgatctaactgtgctgtgtgtggagcccggttcaccagccatgccacttttaacaggtcagctgggcacttatccctgttgtgctgggagcaaattactgggtgtgagttctgctttctgaagtcaaagcgaaggctagaaataggtaatgcaaaggcagctgatgcatgctccttggaagtacaagtaagaaggctaggaaatatgcctattccctcacatagccccaaaggaaaatgaattcccatttattttcccatcagaatatcttcaactagaaagagatgtaggcaattccaagaacactcatgataaagcatggagaaagaagttatagggtagagaggaccctggcatgaggatgcagtctccatcgtgtcctaggaagactggaacgttgtgtccttgtcccgtttgtctagtgtacagtgcagagtctgcctttgcatgcaggtagtgtgagggaaggaggtgagttggtggtctgcaccttgcctgaaggaggtctccacctccaggagcctccattcccacagcaggactgcccctgcaaagctcttatcaaaatcattattctggcttgagtgaaaacaccaagggtttgtctgatttctggtgcattgctgtggcaggtggctcagttaactccagatgggcttttagagttggtagacacccggccgggcacagtggctcacgcctgtaatcccagcactttgggaggccgaggcgggtggatcacaaggtcaggagtttgagaccagcctgaccaatgtggtgaaaccccgtctctactaaaaatacaaaaattagccgggcgtggtggcgtgcgcctgtaatcccagctactcaggaggctgaggcaggagaatggtttgaacctaggaggcggaggttgcagtgagctgagattgcaccattgtactccagcctgggcgacagagcaagactctgtctc

SEQ ID NO: 4588 - DNA, 3538 bp, Homo sapiens
aataattaaggaggctttggaatcaactagacattccaaacacgttccaagtagctctggccagtggtctccagctcagcgtgatctgcttttgtgttgcagttgggattctcaactccctggcttcatcttcaatgacatgtttctctccatttctacgcgtctgccgtcccagtacatctatggctttggggaaactgagcacacgactttcagaagaaacatgaactggaacacatggggaatgtttgctcatgatgagccacctgcgtacaagaagaattcctatggtgtccacccttactacatggcactggaggaggatggtagtgcccatggagtgctcctgctaaatagcaatgccatggatgtgacattacagcccactcctgctctgacataccgcaccacaggagggattttggacttctacattgttttggggccaacccctgaacttgtaactcagcaatacacagagttgattggtcggccagcaatgattccatactgggccttgggattccatctgagtcgctatggataccagaatgatgctgaaatctccagtttgtatgatgcaatggtggcagcccagattccctatgacgtccagcatgtagacatcgattacatgaaccggaagctggatttcaccctcagtgccaactttcaaaacctcagtcttctgattgagcaaatgaagaaaaatggcatgagatttattctcattttggacccagccatttctggcaatgagacacagtatctcccattcattagaggacaggaaaataacgtgttcatcaaatggcctgacaccaatgacattgtctggggaaaggtttggccagatctgcctaatgtaattgtagatggatcccttgaccatgaaactcaggttaagctttacagggcctacgttgcctttcctgacttctttcgtaatagcacagctgcgtggtggaagaaagagatagaagagctctatgcaaaccctcgagagccagagaagagcttgaagtttgatggattgtggattgatatgaatgagccatcaaattttgtggatggatctgtcaggggctgcagcaatgaaatgctaaataacccaccctatatgccatatttggaatctagggacaagggcctgagcagcaagactctgtgcatggagagtcagcagatcctgccggacagctcccccgtggagcactacaacgtgcacaacctgtacgggtggtcccagaccagacccacatacgaagctgtgcaggaggtgacaggacagcgaggggtcatcatcacccgctccacatttccctcttctggacgctggggaggacaccggttgggaaacaacacagctgcgtgggaccagctggggaaatctatcattggcatgatggagttcagtctctttggaataccttatacaggagcagatatctgtgggttctttggagatgctgaatatgagatgtgtgttcgctggatgcaactgggggcattttatccattttccagaaaccacaacaacatcgggacaaggagacaagatcctgtggcctggaattcaacctttgagatgttgtccagaaaagtcctagagaccagatataccctgcttccttatctctatactctgatgcataaagctcacgttgagggcagcacagttgtccggccccttctccatgagtttacggatgacaggacaacatgggatatagaccgtcagttcatgttgggccctgctatcttaatcagccctgtgttggaaactagcacatttgagatctctgcttattttccgagagcccgttggtatgactatagcacgggaactagcagcacatcaacaggtcagaggaaaatcctgaaggctccccttgaccacatcaaccttcatgtcagaggaggctacatcctgccctggcaagagcctgcaatgaacactcactccagtcgacaaaattttatgggattgattgttgctttggatgacaatgggacagctgaaggccaggtgttctgggatgatggacaaagcattgtctttaacaccactgctatgtgaactcctatgactacatgcttgctgtctcgcacagaataaccaaacagtagtctccacacttcagatacctatgaaaatggaaattattttttggcaaactttatagcagctcagaacatcctgcaaatccagaccatacacaataagtatttgagtgactcgaatccactaaaagttgggtatattagaatctggggtgtgaatacctatgtgacacaagtcagtttcacctatgacaaccggcaatttatggagacaaatttcaagagtgaaccttataatcagatactaactattcaattgactgacaagactatcaacctggaaaagttaactgaggttacttggattgatggtggtcctgtacttcctactccgactaagacaagtaccatcccaatgagttctcatccttctccatctactaccaatgccaccagttctgagacaatcaccagttctgccagtgcaaatactaccactggcactactgatactgttcctatcacaaccacatctttcccaagtactactagtgttacaactaatactactgttcctgatacaacttctcctttccctacaagtactactgctagcactaatgctactgttcctatcacaaccacatgttttgcaacaagtactattggtgttacaactaatgctactgttcccgatacaactgcccctttcccaacaaatactactactgctagcactaatgctactattcctatcacaaccacactttttgcaacaagtactattggtgttacaactggtactactgttcctgatacaactgctcctttccctacaagtactactagtactagcactagtgctactgttcctattacaaccacaccttcccctacaaatactgctgatgctaacactagtaatactgttcctaataccactatgccttctcctacaagtagtactactgtgagtactattgctaccgttcccatttcagtgactccttctctgacaagtactgctgatgccaccattagtactactgtacttattgccactacttcttctctaacaggtactactgatgttagcactagtactactattaataatataagtactcctgttcaaacaaatactactaatgctagcactagtactaatgttgctaatataactgctacctctcatacaagtactgatgatactgttcctaataatactgttccagttacagctattccttctcttgcaaatactggtgttgacactactagcaacagtttttccattatgaccacttctttctctgaaagtactaatgctatgaacactactgttattatggcaactacttctcctacaagtactgatgttgctagcacaaataatgatgcttctatgacaaattttcttttagctacaatgtctgctggtaatataactagtaatagtatttccataacaact

SEQ ID NO: 4589 - DNA, 2079 bp, Homo sapiens
agccgacttagaactggtgcggaccaggggaatccgactgtttaattaaaacaaagcatcgcgaaggcccgcggcgggtgttgacgcgatgtgatttctgcccagtgctctgaatgtcaaagtgaagaaattcaatgaagcgcgggtaaacggcgggagtaactatgactctcttaaggtagccaaatgcctcgtcatctaattagtgacgcgcatgaatggatgaacgagattcccactgtccctacctactatccagcgaaaccacagccaagggaacgggcttggcggaatcagcggggaaagaagaccctgttgagcttgactctagtctggcacggtgaagagacatgagaggtgtagaataagtgggaggcccccggcgccaccgttcccatccaggcttgtcggcggccaccggcggaccgggcttcgagatggcctccccgccgcggtgctccccgacagcccatgacagggaatgcaagttgccgccaccctccgcccccgccagcgagtattgtcccggcaagctgtcctgggggaccatggcgagggccttaggccgcttcaagctgtcgatcccgcacacgcacctgctggccaccctcgaccccctggccttggacagggaaccaccaccgcatctgttgcctgagaagcaccaggtgccggagaaattgatctggggcgaccaggaccctctctccaagatcccatttaaaattctgagtgggcacgagcacgctgtgagcacctgccacttctgtgtggatgacacaaagctcctcagtggctcctatgactgcactgtgaagctgtgggatccggtggacggttctgtggttcgcgattttgagcacaggcccaaagctcctgttgtagagtgcagcatcaccggcgacagcagcagagtcattgccgcatcctatgataagacagtgagggcctgggacctggagacaggcaagctgctgtggaaggtcaggtatgataccttcatcgtctcctgtaagttttctcctgatggtaaatacgtggtctcaggcttcgacgtggatcatggaatctgcataatggacgccgagaacatcaccaccgtttccgtcatcaaagatcatcacacaaggtccatcacgtcatgctgctttgaccccgacagccagagggtggcttctgtctcattggacaggtgcatcaagatctgggatgttacatcccaggccacgctgctcaccatcactaaggcacattccaatgcaatctcaaactgctgttttaccttcagtggccatttcctgtgtacaagctcctgggataaaaacttaaaaatatggaacgtccacacaggggagtttcgaaaccgtggagcctgtgtgactctgatgcagggccatgaaggttctgtcagttcctgtcactttgccagagacagctcttttctcatttctggagggtttgataggactgtggctatttgggatgtagcagaaggctaccggaagctctctttgaagggccataatgactgggtgatggatgttgccattagcaacaacaagaaatggatcctgtctgcttccaaggataggaccatgagactgtggaatattgaagaaattgatgaaattcctttggtaatcaagtacaaaaaggccgtgggcttaaagttgaaacagtgcgaaagatgtgacaggcctttctccatcttcaagagtgacacctcttctgaaatgttcacccaatgcgtgttctgccggatagatacaaggggcttgccagcagatacttcatcgtcatcatcatcatcggaaagggagaactcaccgccgccaaggggaagcaaggatgactgacagccacaggcccctttgagtgactccagcacaggctacctagcatgtaggtttcggggctttgcaggggctttctcttgggcccctcccaggctcagcaggcctgtcagactggggcaggacccaagccctggctggactcagcacagtgccacctcctcagctctcagcttggggagtgaacactttccgttttcatgcagaataaatctaattcctttgg

SEQ ID NO: 4590 - DNA, 1611 bp, Homo sapiens
gttggcccaggcaggacgggcagccgagagcactcgggccgcgtcgccaggagccgcccagggtgagccatgttcgtaggcgtcgcccggcactctgggagccaggatgaagtctcaaggggagtagagccgctggatgccgcgcgggcccagcctgctaaggacaggagggccaagggaaccccgaagtcctcgaagcccgggaaaaaacaccggtatctgagactacttccagaggccttgataaggttcggcggtttccgaaaaaggaaaaaagccaagtcctcagtttccaagaagccgggagaagtggatgacagtttggagcagccctgtggtttgggctgcttagtcagcacctgctgtgagtgttgcaataacattcgctgcttcatgattttctactgcatcctgctcatatgtcaaggtgtggtgtttggtcttatagatgtcagcattggcgattttcagaaggaatatcaactgaaaaccattgagaagttggcattggaaaagagttacgatatttcatctggcctggtagcaatatttatagcattctatggagacagaaaaaaagtaatatggtttgtagcttcctcttttttaataggacttggatcacttttatgtgcttttccatccattaatgaagaaaataaacaaagtaaggtaggaattgaaggtattgcagaatgtacatcaatgattggatatgctctgggttatgtgctaggagcaccactagttaaagtccctgagaatactacttctgcaacaaaaacagggaagttgggaaacctcacggctccttgcaatgaaaaatgtagatgctcatcttcaatttattcttctatatgtggaagagatgatattgaatatttttctccctgctttgcagggtgtacatattctaaagcacaaaaccaaaaaaagatgtactacaattgttcttgcattaaagaaggattaataactgcagatgcagaaggtgattttattgatgccagacccgggaaatgtgatgcaaagtgctataagttacctttgttcattgcttttatcttttctacacttatattttctggtttttctggtgtaccaatcgtcttggccatgacgcgggttgtacctgacaaactgcgttctctggccttgggtgtaagctatgtgattttgagaatatttgggactattcctggaccatcaatctttaaaatgtcaggagaaacttcttgtattttacgggatgttaataaatgtggacacagaggacgttgttggatatataacaagacaaaaatggctttcttattggtaggaatatgttttctttgcaaactatgcactatcatcttcactactattgcatttttcatatacaaacgtcgtctaaatgagaacactgacttcccagatgtaactgtgaagaatccaaaagttaagaaaaaagaagaaactgacttgtaactggatcatcattgtattctccaagatttgtttctgtgcccaactttcagaagaggaaaatcacacattatgtttacataagtagcaaaaatatatttatggtgatctgcattttcataataaagtgtcctattgtgaaac

SEQ ID NO: 4591 - DNA, 5325 bp, Homo sapiens
ttttttgcttggacctggagtaatgagagtggacgtttgattccaacaggatggcccatttctccagcgaggaccaggcgatgctgcaggcgatgctgaggcggttgttccagagcgtgaaggagaaaatcacgggtgccccttccctggagtgtgccgaagagattcttttacatctggaggaaactgatgaaaattttcacaactatgaatttgtgaaatacctcaggcagcatataggcaacactttgggttctatgattgaagaagaaatggaaaaatgcacatctgatcagaatcagggtgaagaatgcggctatgatacagttgtacagcaggtcactaaaagaactcaagaatctaaagaactaccttgaatttaaaggtacaaagaaatgatgcattacctgaagaacattatgatagctgtggtcgagtctatgattaacaagtttgaagaagatgagacacgaaatcaagaaaggcagaaaaaaatccaaaaggagaaaagccatagttaccgcacagacaattgctctgatagtgattcatcattgaatcagagttacaaattttgtcaaggaaaattacaattgattttagaccagttggatcctgggcaacctaaagaggtgagatatgaagccttgcaaacattatgttcagctcctccatctgatgtcctcaactgtgaaaattggactactctctgcgaaaaactgaccgtgtctctttcagatcctgatcctgtgtttagtgaccggattttaaaattctgtgcacagacatttttgctttctccattacatatgaccaaggaaatttatacaagcttagctaagtatttggagtcatactttctttctagggaaaatcatattcctactctttcagctggtgtagatataactaatcctaatatgactcgcttacttaaaaaggttcgtcttctaaatgaatatcagaaagaagctccatctttctggattcgtcatccagagaagtatatggaagaaattgtggagagtactttgtccttgttaacagttaaacataatcaaagccatgttgtctcacaaaagattttggatccgatctacttttttgcattagttgataccaaggctgtgtggttcaaaaagtggatgcatgcacattatagcagaactacagtattaagacttcttgaaaagaaatataagtctctggtaactacagccattcaacagtgtgttcagtactttgaaatgtgtaagactaggaaagctgatgaaactttgggacattcaaagcattgcagaaacaagcagaaaactttctactacttaggacaagaattacaatatatttatttcattcactcactgtgccttttaggaagattattgatctataaacaaggcagaaaactatttcctattaagctgaagaataaaaaaggtttggtatccctcatagatctgcttgttctttttacccaacttatctattactcaccaagttgtccaaagatgacatcagctgcccattcagagaattactctcctgcaagtatggtgactgaagttctgtggatactcagtgatcaaaaagaatgtgcagtggaatgcttatataacaacattgtaatagagacacttcttcagcctattcacaatttaatgaaaggaaatgaggcatctccaaattgctctgagacagctttaattcatatagctggtattttggcaagaattgcatctgtagaagaagggcttattttactcctttatggagcaaatatgaactcttctgaagaaagtcctacaggtgctcatataattgcccagttttcgaaaaaacttctcgatgaagatatttctatattttctggatcagaaatgttgcctgtggttaaaggagcttttatttctgtgtgtcgtcacatatatagtacatgtgaaggtttgcaggtgttaatcacttataatttgcatgaatctatagcaaaggcatggaaaaagacaagtttgctatcagaaagaattcctactccagtagagggttctgattctgtttcttcagtaagccaggaatcccaaaacattatggcttgggaagataatttgttagatgatttactacattttgctgccacccccaaaggattactacttcttcaaagaacaggtgctatcaatgaatgtgtgacatttatattcaatcgatatgcaaaaaaattacaggtcagcaggcataaaaaatttggctatggagttttggttacacgagtggcatcaacagcagcaggtggcattgcactaaaaaagtcagggtttattaatgaacttataactgaattatggtccaatctggaatatggaagagatgatgttagggtaacccatcccagaactactccagtggatcctattgaccgaagctgtcaaaagtgaaatatctcagtatgtctggttctccaagtttctgactctagtgaaaatttttagaaaatgtaaagcagtaaactttacagttgcaatcttttttagcactggtgaacttgttatcctatcctgctatttatgagcttgtaaggaatcaagatcttcctaataaaacagaatattctcttcgtgaagtcccaacatgtgttattgatattattgatagacttataattttgaattctgaagctaagattcgttctttattcaactatgaacaatcacatatctttggtctaaggaaataagccactcactatgggcaatcttagcggatttgagcctcagcttctgaagccaggagacagaatcccagagttcatcattttctttcattactttgtccactgaacttaggagcaaccaaccaacttcattatgttccttggttctccacatatggtcaaaggttattaagtgtgatatgctgtgatctggacactcttctcctgttagaggctcagtatcaggtatctgaaatgttactaaatgctcaagaagaaaatatcttggagatttctgagagccacagggactttataattgatggcttatcagtggagagaaatcatgttcttgttagaataaatcttgttggtgggccattggaacggattttgcctccgaggttactcgaaaagagtgataatccatatccttggccaatgttttcatcatatccattgccaaactgctatctgtcagacattacaagaaatgctggtataaaacaagagatggggccaaagaacaagaataccatattctgtgtctctggagctatgcagcgttcagtgaataatgatcttgacaagcttttattatgcctcaaaatatctgataaacaaactgaatggatagaaaactgccaaagacaattttgcaaaatgatgaaagccaaacctgatataatcagtggagaggccttaatagaattacttgaaaaatttgtgcttcatctcactgaaagcccatctgaatgctacttcccttcagtggagtatacagatgattacaacaactacttcgcaaagaaaacttggcctgcaggaagaaattcattcattctatcctcatacgttaccatacattaaaagtggaacactgattacttaaagattagtatcaggaacgaaataaccattcttgtatatatttgtaattcagagttttatgtatgcattgcatgatgaaagtagtatttctagaccactttttgggtcaatggctctttttattctgagagccaagtaaaatagattgttttaaaactactattgttatgtatttaatatgttttccaatgctttttatgggaaaaagttatttgtaaaaagttttctgttaattcctttgaaaatgtaactgacagttcctaaaagaataaattcatcagtgttttcaaaattcacattaaaatatgtaaaaatattgctttcatcaattttcaattaaaatgtgattattatgcaaacttttatacactttataagtcagttttctgttgtctttagctactgatgcaaatgtgaagaatgaaagtctttcatctgtgcagcagcttggcattaaaatgactgtcaggtatggcaaattcctcagtctcttaaaagatggtgcagaaaatgatcttacctgggttttaaagcattgtgagagattcctgaaacagcagcaaacttccataaaatcttctcttctctgcctgcaagggaattatgctggccatgactggtttgtatcttctctgttcatgataatgttgggagacaaagaaaaaacattccaatttcttcatcaattctccaggcttctgacttctgcttttctttggttgccaaggctacatatttctagttaccttcctaatgacactgtagaatctggcatccatccagtatatttttgcagcacccattatattgaaatgctactgaaggctgagttgcctcttgtgttttcagcttttcacatgtctggttttgcaccatcacagatctgcctgcaatggataacccagtgtttttggaattacttagattggatagaaatctgccattatattgctacttgtgttttccttggtcctgattatcaagtgtatatctgtatagctgtattcaaacatttacagcaagacattctacagcacactcagactcaagatctgcaagttttcctaaaagaagaagcactgcatgggtttcgagtgagtgattattttgcatacatggaaattttggaacaaaactaccgaacagtgctgctgagagacatgcggaacattagactgcagagcacatagatcatgagacacacggtttaaatttaggttttatttatttttaaacacagcaggggggcttgatgtttttctgtgtctgtaacaacatttactttgtgaatatacatattgtaaatactgagaagtataacgatatatttaagtaggtatgagctcaatttgtgaattcatttttgtaaatttgttgttttgtaaggttattatagaatcagatctagcttacttttagttcttattcatgtttaagagttagtcctggccaggcgcggtggctcatgcctgtaatcccagcactttgggagtctgaggtgggcggatcacgaggtcaagagatcgagaccatcctggccaaaatggtgaaacctcgtctctgctaacaatactgaaattagctgggtgcagtgatgcgcctgtagtccctgctacttgggaggctgaggcaggagaatcgcttgaacccgggaggcggaggttgcagtgagccaagattgtgccactgtactccagccaggccacagagtgagactctgtctc

SEQ ID NO: 4592 - DNA, 3688 bp, Homo sapiens
gtaagcaagagaaaataaatcaaaatgttacagttattcggaacaatccccacattccttgtaaaccccagatggtcttgaacctgtaccagcttaatcagctcgattgtcctggaggtagattaatcggtggctgggaagataacccttttaaaggagacttaaagattgttcttagaggaaatcatactacacaagactgggctcttccagaaggaccaaatcaaggggcaaaggtcttaggggtgtttggtgagctggatcttcatggaattccacattcaatatataaaactaagctctcagaaactgcatttgcaggttccaaagtcctgtctctgatggatgctgtggattggcaggagggagaagagattgtgataacaaccacaagctacgatttccaccagacagaaacaagaagtatcgttaaaatcctgcatgatcataaaattctcattcttaatgatagcctttcctatactcactttgctgaaaaataccatgtccctggaactggtgagagctacacgttagcagctgatgttgggatactgagtaggaacatcaaaatagttggtgaagattaccccggttggtctgaggactcttttggagcacgcgtactggttggctcattcactgaaaatatgatgacatttaaaggaaatgcaagaataagtaatgtggaattttatcacagtggtcaagaaggcttcagggatagcacagatccaagatatgctgtaacgtttcttaacctaggacagattcaagaacatggctcatcttatattcgaggctgtgcttttcaccatggcttctctccagcaattggtgtatttgggacagatggattggacatagatgacaacatcattcactttacagtgggggaaggcataagaatatgggggaatgccaaccgagtccgagggaatttgattgcactttcggtttggccaggaacctatcagaacagaaaagatttaagttcaactctctggcatgcagcaattgagataaatagagggaccaatacagttttacagaataatgtagtggctggatttggaagagcaggataccgcattgatggtgaaccttgcccaggccagtttaatcctgtggaaaagtggtttgacaatgaagcccatggaggtttatatgggatctatatgaaccaagatggccttcctggatgttctcttatacaaggatttaccatttggacatgctgggattatggaatttattttcagaccacagagagtgtgcacatttataatgtgaccctggttgacaatggaatggccatttttccaatgatttacatgccagctgctatatcacacaaaatttccagtaaaaatgtacaaattaagagctcattaattgttggaagtagccctgggtttaattgctctgatgtcctaactaatgatgatcctaatattgaactcactgctgctcatcggagtcctagatctccatcaggtgggagaagtgggattcgttggcctacctttgcttcagctcataacatggcaccccgaaagccccatgcaggaatcatgagttacaatgccatcagtggccttttggacatctcaggttcaacatttgttggatttaagaatgtttgttcaggggaaactaatgttatattcattactaaccctttaaatgaggatttacagcatccaatccatgtgaagaatataaaactggttgataccactgaacaatcaaaaatatttatacataggcctgatataagtaaggtcaatccatctgattgtgtagacatggtttgtgatgccaagaggaaatcttttcttagagacatagatggctcctttctggggaatgctggttctgtgatacctcaagcagaatatgaatgggacggaaacagccaagtaggaattggagactacagaattcctaaggcgatgctcacattcttgaatggaagtagaattcctgtcactgagaaagcacctcataaaggaattattagagattcaacctgtaagtaccttccagagtggcagagctatcagtgctttgggatggaatatgcaatgatggttattgaaagtctggatcctgacacagaaactcgaagactttccccagtggctataatgggcaacggttatgttgatcttattaatggcccacaggatcatggctggtgtgctggatatacatgccagagaaggctgtccctgtttcacagcattgtggctctgaacaaatcttatgaagtttacttcactggcaccagtcctcagaatcttcgactgatgttgcttaatgttgatcataacaaggctgttctagtaggaattttcttttccacacttcaacgtttggatgtctatgtgaacaacttattggtctgtccaaaaactacaatatggaatgcccagcagaaacactgtgaacttaataaccatctgtacaaagaccaattccttcctaacctggattccactgtccttggtgaaaactactttgatggaacctaccagatgctttatcttttggttaaaggaactatacctgttgaaattcacactgccacagtgatatttgtttctttccaattatctgttgcaacagaagatgacttttatacctctcacaatctggttaaaaatcttgccttgttcctaaagataccaagtgacaaaatccgtatcagcaaaataagagggaagagtctgaggaggaagagatccatgggattcataattgaaatagagattggagaccctcctattcagttcataagcaatggcaccacaggtcagatgcagttatctgaactccaggaaattgctggttctcttggacaagctgtaattttaggaaacatcagtagtatccttggatttaacatttcgtccatgtctattactaatcccctccccagcccaagtgactctgggtggattaaggtgactgcccagccagttgaaaggtctgcatttcctgttcatcacgtggccttcgtgtcctcactcttagtgatcactcagccggtggcagcacagccaggacagccatttcctcagcagccttcggtaaaggcaacagattctgacggtaactgtgtatcagttggaattactgcactaactttgagggccatactcaaggactccaataataaccaagtcaatggccttagtggaaatacaacaattccgtttagcagctgttgggccaactacacagaccttactccccttagaacaggaaaaaattataagattgaatttatactggataatgttgttggggtagaatccagaactttcagcctgctggcagagtctgtctctagcagtggcagcagcagcagcagcaacagcaaagcatcaactgtgggtacatatgcccagataatgactgtagtaattagctgtctggttggaagaatgtggctcttggaaatatttatggctgcagtttcaactttgaatataactttaagaagctactaaagtgctgttccgaagaataggctgaaacaaaaatataagaattattagctactttgttgggcaataggcaaaagtctatagcattttcatgaaaatatactaaaaatatttttatgatatataaaatgtactaattagctttaaacactaaaatcagatttcttcaaaat

SEQ ID NO: 4593 - DNA, 3623 bp, Homo sapiens
aatcctatctccatttcccccgtgcccagcacatagttagtgctccagatgatgggagactcaatggagagacacgtgagtggatggatgttttgctgaaggcatccaatgtggcagaaccggcagcagcaaactgattctgtctggaatttggaagccagggaggaacagcctcgaatggacaggcttttcttagtgcctaaagtgtctgcacatggaaatccagaggtagacagagagaaactgagttccggacaatgcattcactaaagaaagtgacttttgaagatgtagctattgacttcacccaggaagagtgggccatgatggacacatccaagagaaagctgtacagagatgtgatgctggaaaatatcagtcacctggtgtccctcgggtaccagataagcaaatcctatataattttgcagctggagcaaggaaaagagctgtggcgggaaggaagagaatttcttcaagaccagaatccagacagggaaagtgcccttaagaaaaaacacatgatatccatgcatcctatcaccagaaaagacgcatccaccagtatgacaatggagaactctctcattctggaggatccttttgaatgtaatgattcgggagaagattgcactcacagttccacaataactcagcgtttgttaactcacagtggaaagaaaccctatgtcagcaaacagtgtggaaaatctcttcgtaatcttttctcccctaaaccacataaacaaattcatactaaaggtaaatcatatcaatgtaatctatgtgaaaaggcctatactaattgctttcgccttagacggcacaagatgactcacactggagagaggccatatgcatgtcatctatgtggaaaagccttcactcagtgttctcaccttagaagacatgagaaaactcacacgggagagagaccatataagtgtcatcaatgtgggaaagcctttattcaatcctttaaccttcgaagacatgagagaactcaccttggaaaaaagtgttatgaatgtgataaaagtgggaaagcctttagtcaaagctctggctttagaggaaacaaaataattcacactggagagaaaccacatgcttgtcttctatgtgggaaggccttcagtctgtcttccgaccttagatgacatgagagaacatgcactggagaaaagccatatgaatgccatttatgtgggaaagccttcagtcaatgtactagtcttaaatagcatcagaaaattcacgctggagagaaaattataaacttcttcagaacatattctgactttagatgacactgtgttaggaatgacgaaggtaaggaatgtggaagagacttcagctgtagttgtagcatctaaacatgccaaaggactcatattttgaagaaatactggaatcaacatggaagatacttcagttacctttattcttcagtccacatcaataaattcatatggaagagaaattgtatgacatgtatgtaccaaagacttgttagtgatctgagcataaatgacatgagagagctgaaactgtcaacatagtcaactaaaagtcttcagcaacagctttaacttaaaacatgtgggactttcaggtagagaatctctaactctgcattcagtgtgaaaatatttttatttgcaatttattgtcaaataacatgagaaaactttacttggatgaaccctttatttgtattttctgtgaataaacattcagccaagcaccaggcttgatgttcacaagaaaacagagtgataaaatgctgctaaaatggaaaataagagaggaaagccttcataagctaaataagaagggaaagtctttccaagggcaatgaattctcttggaataccaaatacttcttactggagaagttatgcaatgaaaaatcatgagaaatcctttcttcatagagcaacacttgtggcacatgtgagatttcacactggacaaaacatggttagcatcctgaaaggagaaaattctttagtggtaattcatttcttagttgacattaagtttctcacattgaggagctatcaaacttgaaaatcactgtggagaaacctgatagatttctcatcagaaaagtgagtcaagaaggtggacctctagaaaaaactcttaacacatactttagcaaaataattcagaaatttgagaaaatatctattcataaaaatgtggcatataaatgcataatagtaaagtgaccagggaataaattgaatgcagaattatataagaaatctcattaaacttttccaaaagatcaatacttacaaatattgaaagaatacaatctgttgttgaaaaaacttagtatgttggcgaagcccttgtttcatttatgcagccctaacaaatcgatttgcatctgcactccttgggtgagattcttggtcgagattctaccccaacttctgagtctccccagtctttaacagctctttcctcacagctcacctccctttacttcaacgtccactaaaaccacttgtttccatccaaccctcgagttgacacaccagggatcttcagccccacttgctagatttctcagtgtgtcattgcatagatttagcagggaaatggaggctgtatcaaagacccctagtatatgcatttgggtgtccgcagcccttgcctctgtctctgagcagttacctgggatcagagaataaggcagctcttctcttctatccctcagaaggctcttgaaattttgtccctggagcctctctaactggaagtagcagttcatctcatgacaccccacattttattcaggtgagtcctgagttattacacagagacagacacagctgtgctccttttactgcagtccagaagataaaacaccagcatgataaaacagccgaacctgtcagccaccttgcaagcctttcctatattcgattcaatgtacttttcccgaagcaaaatgaaagttctcacagaggggccctcctctgccttgtcctcagaattggaaaatgtattgtccgtgaaggagcctcagtactgaacctaaaactcaagagaaaatgtttcctgaatatcaagtgggatgacttgaaattttgccaaacaggcacaatcttaatacgatcggccttactaaggctaaatggccttatccgtggttgaagttgacaaatcaatatattaaaaaatctccacaagtgattgattttactctgcagccagggtttatgtcaagtgtgaggataatgagcaagaaattcaagcccttggcaaactggttggagaggcaaggactgtgtccaggcagagctcatatcattatttattgtttaatctatttaattaaatatgtaatttacccacaaactgtggctgacattatatgtactcctgagccacattgagatgtactatttgtgctatgaaattctatgggatttgacaaatgcatggtggcagatctccagccattattaaagcgtaacacagaatgcttctcttattcaagctcatcttccctccacatagagggaatcaatcgacttttgtatactgatttttgaatttgcttctttatttccatcttcttcaattaaagcacaagatatcgt

SEQ ID NO: 4594 - DNA, 3889 bp, Homo sapiens
aaaaactcagggaagcccagggcccgtgttgtgcttttggcccaggtaggtggacagacatgtcccaggcgggggacgtagaaggccccagcacaggagaccctgtgctcagtccccaacacaactgtgagcttttacagaacatggaaggagccagctccatgccaggcctgtcaccagatgggccgggagcaagctctgggcccggagtcagggctggcagcagaaggaagatccccaggaaggaggcccttcgaggtggcagctcccgggctgcaggtgctgctgaggtccggccaggggtcttggagctgctagctgtggtacagagccggggctcgatgctggctcctgggctccacatgcagctgccctcggtgcctactcaggggagagctctgacctccaagaggctccaggtttctctgtgtgacatcttagatgacagttgccccaggaaactttgtagcaggtctgctggcctcccagagagagctctggcctgcagggagaggcttgcaggagtggaggaggtgagctgcctcaggcccagggaggccagagacggtggaatgagttctccagggtgtgacagaagaagccccacactcagcaaagaggagccccctggaaggcccctgacatcctcaccagacccagtccctgtgagggtaagaaagaaatggaggaggcaaggggctcattcagagtgtgaggaaggggctggtgacttcctgtggcttgatcagagccctcgtggggacaacctcctgtctgtgggagaccctccccaagttgctgacctggagtccttgggaggcccttgcagacctccctctccaaaagacactgggtctgggcctggagagccaggtggaagtggggcaggatgtgcctcagggactgagaaatttggatatttgcccgctacaggggatgggccccagccaggcagcccctgtggccctgtcgggttcccagtgcccagtggaggggagtccctcagttcagctgcacaggctcctccacagagcgcagcactgtgcctgggggcgtcagcacaggcctctgcagagcagcaagaagctgtgtgtgtcgtgcggactggcagcgatgaaggccaggctccagcacaggaccaggaggagctggaggccaaggctcagccagcttccaggggaaggctggagcaaggactcgctgcccccgctgacacctgtgccagctcccgggagcccttgggcggcctcagctcctccctggatactgaagccagcagggcctgctcaggcccattcatggagcagagaagatccaagggcactaagaacctgaagaaaggtccagtgccctgtgcccaagaccggggcacagacagaagctcagacaactcccaccaggacaggccagaggaacccagcccaggaggctgccccagactggaggaagtgaaaataccccatggagtgaagcttgtgtgctacctgggttccgggccagtgatccagctcctgggggccatcagccacggccaggcaggggggcagctgccaccaaagctggaggttctagaggacttgatggaggtcagctcaccctcacctgcccagaggctcagaaggaagaaaaggcccatggtgcagggccctgctgggtgccaggttttccagccttctccttcaggaggcacagcaggggaccctggtggcctctctgaccccttctaccctccaagaagcggttccctggcccttggcgaccccagctcggaccctgcatgttcccagagtggcccaatggaggctgaagaggattctcttccggagcagccagaggactcagctcagctccaacaggagaagccatccctgtatattggggtgcggggcactgttgtccgttccatgcaggaggtactatggactcgccttcgggagctcccagacccagtgctgagtgaggaggtggtggagggcattgctgctggcattgaggcagccctctgggacctgacacaaggcaccaatggccggtacaagaccaagtatcgcagcctgctgttcaacctgcgggaccccaggaacctggacttgtttctcaaagtggttcatggagatgtcaccccctacgacctggtgcggatgagctcgatgcagctggccccccaggagctggcccgctggcgggaccaggaggagaaaaggggcctgaatatcattgagcagcaacagaaggagccgtgcagacttccagcctccaaaatgacccacaagggcgaagtggagattcagcgggacatggaccagacactgaccctggaggatctggtgggaccgcagatgttcatggactgcagcccacaggccctgcccatcgcatcagaggacaccacggggcagcatgaccaccacttcttagaccccaactgccacatctgcaaggactgggagccctcgaatgagctgctaggctccttcgaagccgccaagagctgcggggacaatatcttccagaaagccctaagccaaactcctatgcctgctccagagatgcccaaaaccagggagttgtctcccacggaaccacaggacagggtccctccatctgggctccatgtgcctgctgcacccacaaaggccctgccctgcctgccaccctgggaaggtgttctggacatgttctccatcaagcggttccgggccagggcccagctggtctcgggacacagctgtcggcttgtccaggctctgcccaccgtgatccgctcggcaggctgcatcccctccaacattgtctgggaccttctggccagcatctgcccagccaaggccaaggacgtctgcgtggtcagactgtgcccacatggggcccgggacacccagaactgccgcctgctctactcatacctcaatgataggcagcgccacgggctggcctctgtggagcacatggggatggtcctgctgcccctgcctgccttccagcccctgcccaccaggctgcgccctttggggggcccaggcctttgggctcttcctgtctcccctctcctttccccaggtctggaggtcactcactcaagtctgttgctggctgtgctgctccccaaggaagggcttccagacacagcagggtccagcccctggttggggaaggttcaaaagatggtctccttcaacagtaaggtggagaagagatactatcagccagatgacaggaggccgaatgtgcccctgaagggcacccctcccccaggaggtgcctggcagcagagccagggcaggggcagtatagctccaaggggaatctctgcttggcagaggccccccagaggcagggggaggctctggccagagcctgaaaactggcagcatcctgggcgagggcagtggcccccagagccaggcttgcgccagtcccagcatccctattcagtagcaccagctggtcatggctttggccgtggccagcacttccacagggactcctgtccccaccaagccctgctccggcacctcgaatccctggcgaccatgagtcaccagctccaagccttactgtgcccccagaccaagagctccatcccccgccctctgcagcgtttgtctagcgcccttgcagctccagagccccctggcccagcccgtgactcctctttggggcctacagatgaagctggctctgagtgtcccttccctagaaaggcctgaccctccttacccaccagaacaggggttttgatgccctcactagtgttgaagcctgttccagagagaggtgggactgcaaggagaggatggtcagccctacccacctgccctgtttgagcttcctgtttgacaatgtttgctgttgattttttgttcaataaagaatttggtaaaattgg

SEQ ID NO: 4595 - DNA, 3770 bp, Homo sapiens
acttcgtaggcgatgctcgagagaacaacatgttctcctgctgtgtcccgacatgctgccgacctcctcgtcgcacaagaggccaaaatgagagtctttcccgagaatatagacattggttcaaccctcaccctcgacgcctctggccctttgccagaaggcacccacagctctcgggcactctctttgcagagctccacacaacagaccaaacaagagctgttggatggattcaatttctccatattcttcaaagggcacgtgcaccacaccaccaaccacgtccagtgccggtctgcggtgagattgggcacagaagggtctccacagacaggacttgtgaaaaccaagtatgaaaatgagatctgcaggatgctaactttccagcccggcactggggagaagctgttgggagtccctggttccagcctttctaactaaacccatctcctcctatgccacctgcctgggcccctcctgggactttatcactgtgccacactttttggaactactggttagaaggtgagtgtccatccccctccaagacacagaggtgcctctgtcccctactggctctgtcttgaagatgcacctctcggagcctcggttggctcctctggaacagggagtagtgagaagacgaacctcacagggttcttgtagggactcaatgatctaagacacagcaaacaaaggggtccctagagcctaaaactctggaaaatctgctgggggtgctgtgattcatgtttgttacttttctcttccccctcacttgaagcagctctcagcattctgcctcaatggcctgtatcactcactgtttggaaaaacacatagaaaccaagtctgcgatggcactggtaaaggatgtctgagattccttctggctggtctttctccttgacacagacagaagaggggtcccttggtgctgaaaaaggagccacaggcccactcagacatctggagaggctcactggggttctccaaaggttggggttcactcattcaacacatacattcaaaacacctcatttgtgcatcgctcttcttggggcttggcataatttcataaacaaagcagatgacaatcccccggccttgattctactcagagtcaggcactcacagtagacagaataaacaagtcatatctacagaatgttacaggtgagaccctcatggcctcctctacgtatggtggcatcctcccagattctgactagaatgacgcagcccagcaacaaatataaactgggtggatttagggttctgaagggccttttcacccacaaaacatgggggaaaatatgtggactctggctggggagagactaaaggagctctggggctcatacttcttataattcccacgagaaggctgacatctggggacttcccccacaagaggcaaatagtgagttctgtaaatggagacttaggtcccctgcaaagcagaggggaggctggggtcacagctggccactgagagacccatccccctcagcaccgtggcttcccagctctccctgtcctcctccccccgacatctgccccttccctcctaaccccaggaccaggggacccagatctggagctttgatgaggaagctgctcacaaatctgcctgcagctgcagtcttgagtgcccaggtgtacagtgctgtgctccggggcctttgggaagagaatgtctgtgggacgccagggcgcacgagggtctgtacagccctgctgtatggccaggtctgccccttccaggacagcactgatggcttacgcaccatcacctccattttgttcaactggccccccgaaaacacttcagtttactatcagcccccgcaacggtcatcttttcggataaagctggccttcaggaacctctcctggcctggactgggcttggaggaccatcaggaaattgtcctaggccagttggtgcttccggagcccaacgaggccaagccagatgatcctgctccacgtcctgggcaacacgcattaacaatgccggccctggagccagcaccaccactgctggcggacctggggcctgctctggagccagagtcacctgcagccctgggtccaccaggatatctacattcagcaccagggccagcaccagcaccaggggaagagccccctccagggacagtgctggagccacagtcagccccagagtcctcctgtccctgtcgtgggtctgtaaagaaccaacccagtgaggagctgcctgacatgacgaccttccctcccaggctgctggcagagcagctgaccctcatggatgcggagctgttcaagaaggtggtgctctacgaatgcttgggctgcatctggggccaaggacatctgaaggggaatgagcacatggcacccacagttcgtgccaccatcgcacacttcaacaggctcaccaactgcatcaccacctcctgcctcggggaccacagcatgagggcccgggacagggccagggtggtggagcactggatcaaggtggccagggagtgcctaagcctcaacaacttctcctcggtgcacgtcatcgtctctgctctgtgcagcaacccaataggtcagctacacaagacgtgggcaggagtgtccagcaaaagcatgaaagagctaaaagaactctgcaaaaaagacactgcagtgaagagggacctactgatcaagagggatgacggtgagaacaacggcaacagctacaggaaactgagccctcagaggccctgtgaggtagctgtggtttgcatcactctttacagaagaggaaacagtctcagggaggcccggctgcaagactgggtgacacacacagggagtgtggatctgggccagtggcggggagctttaaggtggccacccaggagaggaacccccagagagcccagatgaggctgcggaggcagaagaagggtgtggtccccttcctgggggattttctgactgagttacagaggctggattcggccatcccggacgacctggatggcaacaccaacaagaggagcaaggaggtccgagttctgcaggaaatgtagctgctccaagtggctgccatgaattacaggcttcggcctcttgagaaatttgtcacctatttcacaagaatggagcagctcagtgacaaagagagatggggtttcacgatgatgtccaggatcgtctcaaactcttggcctcaagcaatccacccacctcagcctcccaaagtactgacgttacaggtgtgagccaccccacctggcctagaggaggctctcccgtggccagctgcagagagcctatggccatgcctccacggccagcatcaagccctgttgcatggggaccactggggacccaggattccagctgggcaggcactgacaggggacctgatgtgtggctcatggtggcctcacagctgcttctctgtcctgcagctacaagctgtcctgccagctggagcccgaaaacccgtaggctggcaacatcctgcagtggctgggaacccaccgggatgctggccagaacaccggctctgcaccatccctcacccagaccgtagacaccagggaaccacatctaggaggctggcagctcagctgcatcttgccctggatcctcatcaccaactgctcctgctggccaggatcaggccatgggacttttgtgagtcaggcgggagaccattttatgtttattttctttagtgtataagtaagggttttttcttaactttcgttaaaataaaattttaaaaaact

SEQ ID NO: 4596 - DNA, 3944 bp, Homo sapiens
aatctgcataaagctgccttgttggcacaggcaatggcaggactgagagtggacaaaggaaatactccatttcctggcgcttgttttaactgtgggaagcatggtcatactaaaaacaaatgtagaaaaaatcagcgaatcaggccaccagataggggaaaaaagaaaactgcagatcctgaaatatgtccaaaatgtaaaaaaggaaaacattgggctaatcagtgtccctctaagtttcataaagatgggaatacgatttcgggaaatgccatgaggggcctgtcccgggccccattctaaacgggggcatttccagctcagaccattccctcacccctgtacaatgtctgtcccccgccatagccggtagtgccacagtagatttatgctgcataaaagctgtgagacttctacctggggaacccccgcaaaaggtcccaacaggagtctgtggacccttgccagcgggtacaatcggattacttttaggaaagtctagtttaggtttaaaaggggtacaaatacatacaggagtcattgattcagattacaatagggaaattcaaattgttatacctacttatgtttcctggaaagcagagccaggagagcccatagcacagctcctgattgtgccatatgtggaaatgggaaaaagtgaaattaaacgaacaggaggatttggaagcacaaataaacaaggcaaagcagcttattgggtcaaccaaattactgataaatgtcctacctgtgaaataactattcagggaaagaaatttaaaggtttggtagatacaagagcggacatttcaatcatttctctacagcactggccgtccacgtggccaattcaacccactcaatttaacatagttggagttggtgaagcccctgaagtatatcagagtagttctgttttgccttgtgaagggcccgatggacaacccgagactattcaaccaattataacttctgtatctataaatttatggggaagagatttattacaacaatgcagagcccaagttctaattccagaacaattatatagccctcaaagtcaacatatgatgcatgaaatggggtatgtccctggtatgggactacaaaaaaatttgcaaggtttaaaaagttcccgccaaagattaggaaataatttttgatggtggccattgttaagcctccagaacctatacctttaaaatggttcacagataagccaatttggatagaacaatggccactaagtaaagagaaactggaggctttagagaaattagttactgaacagatagaaaatgggcatattgctccaacagtttccccttggaattctccagttttcataattaagaaaaaatcaggtaaatggaggatgttaactgacttaagagctaccaattcaactatataacctatgggagcattacagcaaggattgctttctcttactaaaattccaaaaattggcctttagtagtcatagatttaaaagactgtttctttactatccccttagctgaacaagactgtgaatggtttgcatttacaattcctgcagtaaacaacctgcagcctgctaagcgttttcattgtttcacagatgtgtctagtaatggtaaagcttcttagtttggctcaaaaagtaaagttttcagacgccctatacttcagctcaaaaagctgagtagctgtaattgagttattgactgcttttgatatacctattaatgtgatttctgattcttcatacgtggttcattccacacagttaattgaaaatgctcaattacaatttcatacagatgaacaactgatgactttatttacccaattgcaaacagcagttagaagtagaatgcaccatttttgcatcactcacatttgggctcatacacctcttctaggacctttgactgaagggaatcaaatggctgatcacttagttgctaatgcaatatctaatgctagacattttgaccatttaacccacgttaatgcctctggtctcaaatgcagatacagcattacctggaaagaagctaaaaatattatccactgatgcccaacttgccaaatgatacattcctcatcttttacaggaggagttaatcttcaaggattggaacctaactcggtttggcaaatggatgtcacacatgttccctcgtttgggagactagcttatgtacatgtatgtgtgggcaccttttctcactttgtctgggcttacatgccaaacaggagagtcttctgcctgtgttaaatgtcatcttttgcagtgttttgtggtgatgggcattcccgcttctataaaaacagataatgccccaggctatactagccaagttctagctacatttttctctatgaggaatattaaacacattactggtatcccgtacaattctcaaggacaagccatagtggaaagaatgaatctctccctaaaacagcagttgcaaaagcagaaagggggagacagagaatatggaacaccacaggagcaactgaatctggcattattaactttaaattttttgagcctgcccaaaggccagatgttatcagcagctgaacagcatctacagaaaccagctgcaaagacagaagcagaagaatgatttggcagagagatccaataacaaaaatttgggaaataggtaaaataataacttggggtagaggttatgcttgtgtttctccaggccaaaatcatcagtcagtttggataccataagacacctgaaatcttgtcatgggccagatgccaaggaagagattccgggaggatcctgaggacccccccggttgcagccatgtcaaggctggtgccgaggaggaccccaactgtcacgagcaacacccatcgaatacagccaccgacctggagacagatcaagaagctgtcacagatccaggaagacaacctgaggaaagcaggacaaccactcacagtgaataatttaatggtagctatgatggcagtgatcaccatttctgtgagtattccttcaacaaaggctgacacagagaacaattgtacttattaggcatatttatcaatcttagctggtaataatgcctggatgtaaatcactgtatgacacagttacacatgctttctgatctcagtatttaccataataaatctgctcctgtaattgaggcatacaacccccaaaaacctatttgtaaacaggattggactcagttagaaaaaatgaacgtatttgtttagcaagattgcattgcagaacaggcagaggtgctgcacaatgattcccatggaatcattattgactggtcccctaagggatatttagcttgaattgcacttctcagtctatgtgtcacgttcacactatgttcagcagatctgaacaaaatggtcagatggtagaaaagataagtgaggggaaaagaaagagaaatcagactgttactgtgtctatgtagaaagaagtagacataagagactccattttgttctgtactaatagaaattcttctgtcttgagatgctgtgaatctgtaaccctagctccaaccctgtgcttgcagagacatgtgctgtgtcaactcaaggtttaatggatttagggctgtgcaggatgtgctttgtttaaaaagtgcttaaaggcagtatgcttggtaaaagtcatccccattctctaatctcaaatacccaaggacacaatacactgcggaaggccgcagggacctctgcctcagaaaaccaggtattgtccaaggtttctccccatgtgatagcctgagatattgtctcatgggaagtgaaagacctgactgtcccccagcctgactcccataaagggtctgtgctgaagaggattaataaaagaggaaggcctctgcagttaagataagaggaaggcatctgtctcctgctcctccctaaaaataaaatgtcttggtgt

SEQ ID NO: 4597 - DNA, 3897 bp, Homo sapiens
agtcctgaggcgggctgaaagcccaggtggggctcggagaagaggaagctccgcctcgcttcccggcattaaaaaatatttaatcattcatgtgttgagactcattcttgagttatggatgacaaggcttctgttggaaaaatcagtgtctcttcagactcagtatctactcttaatagtgaagattttgtcttggtttccaggcaaggagatgagacaccatctacaaataatggaagtgatgatgagaaaacaggactcaagagccagtgaaattaaaagtgcagcagatatgttaaacagcaaattacacatggctgaagagagaatcaaatacctggaaaatggatctgaagaaattatccagaagatagcattgaaagatatgaaagaccacttaagagacatgaaaattaagatgagaaggaccaaccatcttaagtgttctataataagagaatggtgaagatggaagaaaatacttgaagagataatagttgaatattttccagaagtgataaacgatataaatcattggcttcaaagaacacaattgtagggaatggaagtgaacagcagctgcaaaaagagctagcagatgtactgatggatcctccaatggacgaccagccaggggaaaaggagcttgtgaaaaggtcacaactggatggtgaaggagatgggcctctttctaatcagctctccgcttcatccaccattaaccctgtgccattagtagggctccaaaaaccagagatgagcctaccagtgaaacctggacaaggagattctgaagcttcaagtcctttcacaccagtggccgatgaggacagcgtagttttcagtaaactgacttacttaggctgtgcctcggtaaatgctcccaggagtgaagtggaagccttaaggatgatgtccatcttaagaagccagtgtcagatttcactagatgttaccctttcagtgccgaatgtgtctgaaggaattgtgagactcttagatcctcagacaaacactgaaatagcaaactaccctatctacaaaatcctcttctgtgtcagagggcatgatggaactcctgagagtgactgttttgctttcactgaaagtcattacaatgcagagctcttcagaatacacgtcttccggtgtgaaatacaagaagctgtaagccggatactttacagttttgccactgccttccgccgttctgccaagcagaccccactttcagccactgctgcaccccagactcctgacagtgacatctttaccttctctgtgtctttagaaataaaagaagatgatggtaaaggttattttagtgcagttcccaaagataaggacagacagtgctttaaactacgccaaggaattgataagaagattgtcatctatgtgcagcaaacaactaataaagaacttgccattgaaaggtgttttggtcttctccttagtccaggaaaagatgtacgaaatagtgacatgcacttattagatttggaatctatgggcaaaagttcagatggaaagtcgtatgttattacggggagctggaatccaaaatccccacattttcaagttgtaaatgaagaaactcctaaagataaagtcctgtttatgaccacagctgtagatttggtaataacagaagtacaggagcctgttcgatttctcctggagacaaaagtccgcgtttgctcacctaatgaaagattattctggcccttcagcaaacgtagtactactgaaaatttctttttgaaactaaaacagataaagcaaagggagagaaagaataatactgacactttatatgaagttgtatgcttggaaagtgaatcagaaagagagaggaggaaaactacagccagtccttcagttcgcctgccacagtctggatcgcaaagttcagtgataccttctcctccagaagatgatgaagaggaagataatgatgaacctctcctgagtggatctggtgatgtatccaaagaatgtgcagaaaaaattcttgaaacatggggagaactgttgtcaaaatggcatctcaacttgaatgtgagaccgaagcagttgtcatccttagtaagaaacggtgtccctgaagctcttcgaggagaagtctggcagctgctagcaggctgtcataacaatgaccacctggtagagaaataccgcattcttatcacaaaggagtctccccaggacagtgctatcacccgggatattaaccgaacattcccagcccatgactactttaaggacacaggaggagatggacaagattccttatataaaatatgcaaggtatttcatgtcaaaaaaaaaaaggactcaattctgagtggtggttctactttgaaattacataagaaacaactacaaagtgtaatttgtatttgatgttcaagaattccaaaaagagaaaagacattgcaaagtcaaaggcttattctgtgtatgatgaagagattggttattgccagggccagtcatttcttgctgctgtgctccttctccattttaaaatgcttggcaagaataccacacaggtgatgtcagcaaagagttttgagtacctgttatgatctgtactgtgctgaagatcagagatgcctgaagaacaggcattcagtgttctggtcaagatcatgtttgactatgggctcagggaacttttcaagcaaaacttcgaagatttgcattgcaaattttaccagttggagcgcctcatgcaggaatacattcctgacctgtacaaccacttcctggatataagccttgaagcacacatgtatgcctcccagtggtttcttactcttttcactgcaaaattccctctctacatggtcttccatatcatcgacctgcttttatgtgagggaataagtgttatttttaatgtcgcccttggattattaaagacttcgaaagatgacctgctgttgacagactttgaaggtgccttgaagttctttagggttcagcttcctaagagataccgctcagaagaaaatgcaaaaaaactaatggaattagcctgcaacatgaagattagtcagaagaagttgaaaaaatacgagaaagaatatcacaccatgagggaacagcaggcccagcaagaagaccccatcgagcgatttgagcgggagaataggcgtctacaagaagctaacatgaggttggaacaggaaaacgatgacttagcccatgagctggtgaccagcaagattgcactacggaaggacctggataacgctgaggaaaaggcagatgctctgaataaggagctgctgatgaccaaacagaagttgattgatgcagaagaagagaaaagacggctggaagaagagtctgctcagttaaaagaaatgtgccgtcgggaactcgacaaggcagaatctgagattaaaaaaaacagttctatcattggtgactataagcagatttgttctcagttgagtgaaagattggagaagcagcagacagccaataaggtggaaattgagaaaattcggcaaaaagtggatgactgtgagcggtgccgggaatttttcaacaaagaagggcgtgtaaaaggcataagctcaaccaaggaggttttagatgaggacacggatgaagagaaagagacgctcaagaaccagctgagagaaatggagctagaactggcacagaccaaactccagctggtggaggccgagtgtaagatacaggacttggaacaccatttagggcttgccctcaatgaggtgcaggcagccaagaagacgtggtttaaccgaacactgagctccataaagacagcaaccggggttcaagggaaagagacttgctgagagcagctgccgcctcccgacaccttcagaaaacacgacaccttttgttgccttc

SEQ ID NO: 4598 - DNA, 4421 bp, Homo sapiens
attagagtagacttcctgtccttctcttcagtagcatagtcatgtaagagctgatctggaatgaacagatatcttgggaaggagaattcaagaaggaagttatggagacaaaaatggggaatgcggaaacattgaagagccagagaaagaagaaaaaggaaagagatgctaagaaagggagcaaatagatacctaactgtgaagaagaaagatggatcagaaacagctcatgcaatgatgacctgtaatttgactcataatacaaaacatgctgttaggagcctaattcaaagatttcctgtcaccaataaagagcgtacagaacttctgcctaaaacagaaagaggaaatgtgtttgcagttgaagctgaaaaccgggaaatgagcaagacaagtgggcgactcaacaatggcatacctcagattccagtgaaaagaggagaatccgaatttgattcttttaggcagtctttaccagtgtttgagaaacaggaagaaattgttaaaataattaaggaaaataaagtagttttgattgtaggagaaactgggtctggaaagaccacacagattcctcagttccttttagatgattgctttaaaaatggtatcccctgccgtatattttgtactcaaccaagacgattggcagctatcgctgtggctgaaagagttgccgcagagagaagggaaaggattggtcaaacaattggttatcagatccgattagaaagcagggtttctccaaagacacttctgacattttgtactaatggggtattgcttcgtacattgatggcaggagatagtacgttgtcgactgtgacacatgttatcgtggatgaagtgcatgaaagggatcgatttagtgattttttacttacaaagttaagagatttgttgcaaaagcacccaactttgaaactaattctttctagtgctgccttggatgtaaatctctttataagatattttggaagttgtccagtgatatatatacagggaagaccatttgaagtaaaagaaatgtttctggaagatattttaagaacaactggatatacaaacaaagaaatgttaaaatataaaaaggaaaaacagcaagaagagaaacaacaaaccacacttacagaatggtactcagctcaagaaaatagtttcaagcctgaatctcagaggcagagaactgttctaaatgtgactgatgagtatgacttactggatgatggtggtgatgctgtcttcagtcagctgactgaaaaagatgtgaattgccttgaaccatggttaataaaggaaatggatgcttgcctttctgatatatggctacataaagatattgatgcctttgctcaggtctttcatctcattttaactgaaaatgttagtgttgattacagacatagtgaaaccagtgcaacagctctgatggttgctgcaggacgtggctttgcaagtcaagtagaacagttaatcagtatgggagccaatgtccatagtaaagcatcaaatggctggatggcattggattgggctaaacactttgggcagactgaaattgtggatcttctagaatcttacagtgcttcactggaatttggaaatctagatgaaagttctctggttcaaacaaatggaagtgacctcagtgctgaagacagagagctcctgaaagcttatcatcatagtttcgatgatgaaaaagtagacttggatttgatcatgcatcttctatacaatatctgccatagttgtgatgctggtgcagtactaatttttctgcctggatatgacgaaattgttggactgagagatcgcatcctgtttgatgacaagcggtttgctgacaatacacatagataccaagtctttatgcttcattcaaatatgcaaacatccgatcaaaagaaagtattaaaaaacccacctgcaggtgttcgaaaaataattctttccaccaatattgctgaaaccagcatcacagtcaatgatgttgtctttgttattgattctggtaaggtgaaagagaaatcctttgatgctctgaattttgttacaatgttaaaaatggtatggatttccaaagctagtgccatacagcggaaaggcagggcagggcgatgtagacctggaatttgttttcgtctgttcagtagactccgattccagaatatgttggaatttcagactccggaacttttgagaatgccattacaggaactttgcttacataccaagctgttagccccagttaattgtcccattgctgattttcttatgaaagctcctgaacctccaccagctttaattgtaagaaatgctgtacaaatgcttaagacaatagatgcaatggatacatgggaagatctgactgaacttgggtatcatttggctgacttgccagtagaaccacatcttggtaaaatggtcttgtgtgctgttgttttaaagtgtctggaccccatccttacaattgcttgcacgctagcttatcgagatccttttgtactacctactcaggcctctcaaaaacgtgcagctatgctttgtaggaaacgttttactgcaggagctttcagtgaccatatggcacttctcagagcattccaggcctggcaaaaagcacgaagtgatgggtgggagcgagccttttgtgaaaagaattttctttcacaggctactatggaaataatcataggcatgagaacacagttgcttggtcaacttagagcatcaggttttgttagagcacgaggtggtggtgacattcgggacgttaacacaaactctgagaattgggctgtcgttaaagctgcattggtggcaggcatgtatcctaatttagtccacgtggacagagagaatctagtgttgacagggccaaaggagaaaaaagtacgatttcatcctgcttcagttctcagtcagcctcaatataaaaagattcctccagccaatggtcaagctgcagcaattaaggcactgcccacagattggcttatttatgatgaaatgaccagagcccatagaatagctaatattagatgttgttcagcagtgacgcctgtcactatattggtattctgtggaccagctagattggcaagtaatgctcttcaggaaccttcatcctttagagtggatggcattcccaatgacagtagtgatagtgaaatggaggacaaaactacagctaatttggcagccttgaaacttgatgagtggctccatttcacactggagccagaggcagctagtttattgctgcagctcagacagaagtggcatagcttatttttacgccgaatgagagctccatctaaaccttggtctcaagttgatgaagctaccataagagcaattatagctgttttaagcactgaagaacagtctgcaggtttacaacaaccatcggggattggccaaaggccaaggcctatgtcttcagaagagcttcctttggcctcatcttggaggtcaaataatagtaggaaaagttcagcagatactgaattttctgatgagtgtactactgcagaaagagtactgatgaaatctccatctccagcattacacccacctcagaagtacaaagatagaggaattttacatcctaaacgaggtactgaggaccgatcagatcagtcttctctgaaatctacagacagcagtagttacccaagtccttgtgctagtccttctcctccatcctcaggaaagggctcaaaatctccttcgccaagaccaaacatgcctgttcgatacttcataatgaagagtagcaatttgagaaaccttgaaatttctcaacagaagggtatctggtctacaactcctagtaatgaacggaagctaaatcgagccttttgggaaagcagcatagtttacttggtattttctgttcaaggatctggacatttccagggattttctaggatgtcttctgagattggaagggaaaagagtcaggactggggctctgctggactaggaggagtatttaaggtggagtggatacgaaaagaaagccttccctttcaatttgcacaccatttactcaatccatggaatgacaacaagaaagtgcagataagcagggatgggcaggaactagaacctcaggttggtgaacagttgctccagttatgggaacgtcttcccttgggagaaaaaaacacaactgattgacactcagaactcttagctgtggaagaacatcatgcctatttataaccactgaatgcactgactttcaaaaactgaggtggggtgtgtgttacgaatgggctttttaacacttttagagtgttgctttagaactaccatcttcatatacaggagaaaggaagcatttaaatttttatagtgattatagagaatgattatatgatgtttgtaatgaataaaatagtagtttcatt

SEQ ID NO: 4599 - DNA, 3613 bp, Homo sapiens
aaaaaagaaagccgagggctcctctcaaagcactgatcgcgtcaaagtaggaaggcagcacgtcatcacaacttccccaaaagtatcagggcaaagccagccagctacacaaagttgcaagctgtcaaacccattttgaacttcttgagttctgccctcccaggatgggaaggaacaagtgggtccagaaccccgcaatcgtttttcccgcgtgctcacctaacccgctccggccactcccaagggatcccggagaaggggtccagctgcccaaatgactgggcgcctgatggagtgccaagccggagcctcactggtttacctgttttctatttcgaccggatccgcgtcaggcggctgcaccttcaccttcacctccgccatgagggcgcagttcctgacgcctggggggaaagatgcacggagcagcccggtagcaagccgcggaacccggaatgtcaatgcccatcggacgcacaagcctggttccttcattctgagttgggaaaccaacttttagcacttggcaactctgtgaaggaatattcttagatgcctatgggaaagcactgggaaaggaactccaggcgggtaccaggctccctgcggagcggcaggggccggtctagttgctaagaagctgagtctccaccaatcatctgcccagcacccagtgggcggggcgcggctcgccgcgtctgtggtaacccgggcggcggcgaaggaggaggcaagaggcgttttgctgcatttaaattaagtgctgctcttcagcttttgtgtacagctataagtgcacattggaatttatatgtatatatatatatagagagagagagagagagaaaatgactgctggttcagtgtgtgtccctcagatcataccactacgagtgcctcagcctggaaaagctaaccatgaaattgataacaatacgcttttggaaatgaaatcagacactccagatgtcaacatatattatactctggatggcagcaaacctgaatttctaaagagaattggttatggggaaaataacacatttaagtatataaaacctattactctgcctgatggaaaaatacaagttaaagctattgctgtctctaaagactgcagacagagtggcattgtgacaaaggtgtttcacgtagactatgaaccaccaaatatagtctctcctgaagacaatgttgaaaatgttctcaaagattcttcaaggcaggaattcaaaaatggatttgttggatcaaaactaaagaaaaaatataagaactctgaaaatcaacgcagctggaatgttaaccttagaaagtttccagagagtccattggaaatcccagcttatggtggaggatcaggttctagaccacccacccgccagtcccagtcccccggttttgcacacgtaagcggtcagaagtgtttgacaagcacggagataatgagaattcaaagggagacagactttctcaagtgtgcccactgccttgccccccggccgtcagatccctttgctcgcttctgtcaagaatgtggctctcctgtcccacccatatttggctgtcgtctcccacccccagaaggagctcagatgggcttgtgtgcagaatgcagaagcttggtacccatgaacactcccatctgcgtggtgtgtgaggcccctcttgctctacagctgcagccacaggcaagcctccacttgaaggagaaggtaatttgccgggcctgtggtacaggaaatcctgctcacctgagatactgtgtcacctgtgagggggccctgccttcatcacaagagtcgatgtgcagtggggataaagcccctcctccgcccactcagaaaggggggaccatttcctgctacagatgtggtcgctggaatctctgggaggcgtccttctgcggctggtgtggagccatgctcggcattcctgctggctgttctgtttgccctaaatgtggggccagcaatcacctgtctgcccgattctgtggctcctgtggtatttgtgtgaagtccctagtgaaacttagcttggacagaagcctggctctagctgctgaggaacctcgccctttttctgagtccctgaatattcctttgcccagatctgatgttgggactaagagggacataggaacacagactgttggcctcttctacccatctggcaagctgctagcaaaaaaggaacaggaactagcctctcaaaagcagaggcaggagaaaatgagtgaccataaacccctcctgacagccatcagcccaggaagagggtactggagaagacagctggatcacatctctgctcacctcaggtgttatgctcagaacaaccctgaattccgggccttgattgcagaacccaggatgggaaagcttatctctgctactgtccacgaagatggttgtgaagttagcatcagactgaattatagtcaagtctcaaacaaggtgaggaaactgaggctcagagaagttaagcaacctgcttcttccaagggcactaagttagtaagtggcagacccaggattcacacttggcagcctgagaccttcccatcatgacaccctaattccaagacattgaaggactttaagcagagaaatgacacaatcacttataaaggatctaaagaacctttacctgaacaaggcagtgaatttcagcgatcaccttctgagcagtgctgccgagggtgatggggggctgtgcggcagcaggtccagctgggtgagtgactacagccagagtacctcagatactattgaaaaaatcaaaaggataaagaatttcaagaccaaaacttttcaagaaaagaaggagcagcttatacctgaaaacagactcctgctgaaggaaatcggacccacgggggaaggaagagtctctgtgattgaacagctgctggatgagggagcagaccccaactgctgtgatgaagacaatcgacccgtcataaccgtggctgttatgaataagcaccatgaagcgattccagttctcgtgcagagaggagcagacatcgaccagcagtgggggccgctcagaaatacagctcttcatgaagcaactctgcttggccttgcaggaagagagagcaccgccactttactgggatgcaatgcaagcatccaaaagaagaatgcaggaggccagacagcatacgacctggctctgaacactggagatgaccttgtcacctcactctttgctgccaagtttggccaagggcttgaggaccaactcgctcaaactaggagcctcagcctggatgactgttagccctgaggcctccacgggacttcatttaagaatacgtgcatggctggcacagtggcttacgcctgtaatcccagcactctgggaggctgaggctggcgtatcacctgaggtcgggagttcaagaccagcctgaccaacatggagaaaccccgtctctactaaaaatacaaaattagtcgggcgtagtggtgcatgcctgtaatcccagttactcgagaggctgaggcaggaaaatcgcttgaacccgggaggcagaggttacagtgagccaagatcgcgccatcgcactccagcctgggcaacaagagcaaaactccatctc

SEQ ID NO: 4600 - DNA, 3769 bp, Homo sapiens
acaccggtggtctgggctgtggcgcgcgggtcggggcccgaggcgggcggccaggaaggacctgatgaccttcgaggatgtggccgtgtacttctcccaggaggagtgggggctcctggacacagcgcagagggccctgtaccgccacgtgatgctggaaaacttcacacttgtgacctcacttggactctctacctcccgacctcgtgtggtcattcgacttgagcgtggcgaggagccctgggttcccagtggaaaggacatgaccctggtcaggaacacctacgggaggctcaactctggtgagtgggagctcaggtggggtgaactaaggaccaacctgtggccaagcccatgtccctgcttttctgactctggaaacacatcctcctctcctgcctcctacctgactcccttctcttccatcatcagcctctcctggaggctgctgccttagtaggtgcccttgaagggagagctccaagggcacaggagctgggttcacacagaagggcctaccttcagctgggctgtgtggccttgaaccctccacaactagcagccattattgataggtatttatttcgcccatcatttatctttgtattcatcaaatgtttcctgagggcttgtgggcattgtagacacagccttgaccaggacactcatggtcctgcctttgtggggctgatggtgctaggggagacgcagtgagtacgtaggattcaggagtgcagtcttgagcattggttggaggtcattgcaagagcaggtttgggagtgggtgcccaagacggggcaccaggggagaagggagtgagctatggaaagggagggggtggaacagccagtgtggagacgtgggtggcacgcagcagctgctgttttcctcagcttcacatcctgggtgtctgggggctgccgccttgatcatgggagtccccactgcagtcagtgccacacctgtcagggcagatgcttcctccaaaccccagcccctcctgcagagccagcctcacctcttctttttccctaagcttttgtcccggctcctgggctcccccttgcctgtccactcagccggccctggtcctctcctaaccaggatgccccaggcaaccaccgtttctctgcgtttaggttcctggagtttgacagaggatagagatgtttctggagaatggccacgagctttcccagataccccacctgggatgactactagcgtcttcccagttgccgatgcctgccacagtgtaaaaagcctgcagcgacaaccgggtgcctccccatctcaggagagaaaacccacgggggtgtcggtgatctactgggagaggctcctgctaggctcgcgcagtgaccaggccagcatcagcctgcgactgacctccccactcaggccccccaagagcagccggcccagggaaaagaccttcacagagtaccgggtgcctgggaggcagcccaggacgcctgagcggcagaagccatgtgcacaggaggtccctgggagagccttcgggaatgcctcggacctgaaggccgccagtggtggcagggatcgcagaatgggcgcagcttggcaggagcctcatagactcctcggtggccaggagccctcgacctgggacgagctgggcgaggctcttcacgctggggagaagtccttcgaatgcagggcgtgcagcaaagtgttcgtgaagagctccgacctcctcaagcacctacgcacccacaccggggagcggccctacgagtgcacccagtgcggcaaggccttcagccagacgtcgcacttgacgcagcaccagcgcatccacagcggcgagacgccctacgcgtgccccgtgtgcggcaaggccttccggcatagctcctcgctggtgcggcaccagcgcatccacacggccgagaagtccttccgctgctccgagtgcggcaaggccttcagccacggctccaacctcagccagcaccgcaagatccacgcgggtgggcgtccttatgcttgcgcacagtgtggccgccgcttctgccgcaactcgcacctgatccagcacgagcgtacgcacacaggcgagaagcccttcgtatgcgcgctccgcggtgctgccttcagccagggctcctcgctctttttgcaccagcgcgtgcacacaggcgagaagcccttcgcctgcgcccagtgcggccgctcctttagccgcagctccaacctcacccagcaccagctcctgcacacgggcgagcggcccttccgctgcgtggactgtggcaagggtttcgccaagggcgccgtgctgctcagccaccggcgcattcacacgggcgagaagcccttcgtgtgcacgcagtgtggccgcgccttccgtgagcgccctgccctcttgcaccaccagaggatccacaccacagagaagaccaatgccgcagcaccagactgcaccccggggccaggtttccttcagggacatcatcggaaggtgcgccggggagggaagccaagcccagtcctgaagccagcgaaggtctgaggtcacaggtcgcagcccaaccctttcttggccttctgtgaatcccttccacagctaaagggtccgagtgctcttcagatccacgatggggaaaagctctgtgcctgagagtcagggacgagggagaccctttggctgtggttccatttgcaggtggggacaggatttgccagttcagtcatagctcacacctccatcctcaaagaggtaacactgcagaaacatcagagggaggacatgtcagctggaactctggtggggctgaggctgtagttggggccataggacgccgacaaaggcagcgctgcatggtggtgctacttcatgtgttatgagagtggatgctgaggtgagggggatgcggacatggggtaggatgacctagagaaacttatgatgtctgcacacaaactggccgctagacggacgctgaggacattttccccctgaggcctctattcaaggcttcctgggggccatctcagcaaacaggagactacaggggactggggatcagggtgtggcctgtgagtgtcagcctcctcctcggaaaaagaaaagctttgggtcaactcagcatcatgtttgcagatgctgacagacgggatcctaatgagagtcaatgtgtgctcactgccagctcctgggctgtgctctggtcagccaggtgtgagggcctggcctggggtcacacagctgactcaggagaggaatgcccatggttctcagcattggaaggacaaacctaggatgatggctttccagtggcactcgttcaggttttcgtccaagtctcagcttggccaaggcctgtcgctcactcatttacaaaagtcgatgtgaggaggagcctttacacctgtggagacagtgatagctttggagcagataaggtggagctgctcatttttgctggatttggtggccgatccccgcccccacccccaccccctccatctcacctttcccttgttatgcctcctcaattggaggctggacagagagctgaataggaaggacttgccattacctaaggccatgtgtgacagcctcctgaggacctccccaacccagtgtgatgggcctgcatggcagagacaaaagggtagactgggggtcatttgcttcctgtggccttaagcctactaggccccatccttacctgagacctcacctccaagaaattaatggtcttttcaatggagaaaaaaaagactagtatttgcaacttc

SEQ ID NO: 4601 - DNA, 4428 bp, Homo sapiens
agactgaagcacagaatagcagaagaagttgttaaaattgaagaaagaaaaaataaaattgatgatgaattaaaagaagtacaacctttagtcaatgaagctaaactagcagttggaaacattaagcccgaatcactttcagaaattcgctcactacgcatgccacctgatgtaattagagatattcttgaaggagttttaaggttgatgggtatctttgatacatcttgggtgagcatgaaaagtttccttgcaaaaagaggtgtaagagaagacatagcaacctttgatgcccgaaatatttcaaaggaaataagagagagtgttgaagaacttctttttaaaaataaaggctcttttgatccaaagaatgctaagcgtgccagtactgcagctgcacctttggctgcctgggtgaaagccaatattcagtattcccatgtcttggaacgaattcatcctttggaaactgaacaggcaggattagaatcgaatctgaagaaaactgaagacagaaaaaggaaactagaggagcttcttaattctgttggtcaaaaggtatcagaactcaaagaaaaatttcagagcaggacttcagaagctgccaaacttgaggctgaagtaagcaaggcacaagaaacaatcaaagctgcagaagtcttaattaatcagcttgacagagaacataagagatggaatgcacaggttgtagagataacagaggaattagctactcttcctaaaagagctcaacttgctgctgcatttattacatatctttctgctgctcctgaatctctgagaaaaacctgtttggaagaatggaccaagtcagctggtcttgagaaatttgatctgaggagatttctttgtactgaaagtgagcagttaatttggaaaagtgaaggcctaccatcagatgacctttccatagaaaatgctcttgtaatattacagagtcgagtgtgcccatttcttatagatccttcttcccaagctacagagtggttaaaaacacatttgaaagactcacgtttagaagttatcaatcagcaggatagtaactttatcacagctcttgaattagcagtacgttttgggaaaacccttattatacaagagatggatggtgtagaacctgttctttatccattattgagacgagatctggttgctcaaggaccacgttatgtggtacaaataggtgacaaaattattgactacaatgaagaattccgcctctttttgtcaacaagaaacccaaatccttttattccaccggatgcagcttccattgttactgaggttaactttactacaacaagaagtggattacgagggcagcttttagctttaaccattcagcatgagaaacctgatttagaagaacagaaaacaaaactattacaacaggaagaagataagaaaatacagctagccaagctcgaagaatctcttctagagacacttgccacatctcaaggcaatattttggaaaataaggatttgattgagtctttgaatcagacaaaagcaagcagtgcacttattcaagagtcacttaaagaatcttacaaactccaaatttcccttgatcaagaacgggatgcctatctccccctggctgagagtgccagcaagatgtacttcattatttctgatttgtccaaaattaataacatgtaccgttttagtttggctgcttttctccgacttttccaacgagctctacaaaacaaacaggattctgaaaatacagaacagagaatccagtcacttatcagctcattacaacatatggtatatgaatatatatgtcgttgtctatttaaggctgatcagttgatgttcgctttgcattttgttcgaggcatgcatcctgaactttttcaagaaaatgaatgggatacgtttacaggtgtggttgttggagacatgttacggaaagctgactctcaacaaaaaatacgtgatcagcttccgtcttggatagatcaggaacgaagctgggccgtggcaacattaaagattgctctccccagtctttatcagaccctctgctttgaagatgcagctctgtggcgtacttattataataattcaatgtgtgagcaagagtttccatctatccttgcaaagaaagtttccttatttcagcagattcttgtagtacaggcgctaagaccggacagattgcaaagtgccatggctctttttgcatgtaaaactctgggactgaaagaggtgtccccactgcctctaaatctcaaacgtttatacaaagagacactggaaattgaacccatcttgataattatttctccgggtgctgatccttctcaggaacttcaagaactagctaatgctgaaagaagcggagagtgttatcaccaggttgccatgggtcaaggtcaagctgatttagcaattcaaatgctaaaagaatgtgcccgcaatggagactggctctgtttgaagaacttacatcttgtggtatcttggctgccagttctggaaaaggaattgaatactcttcaacctaaagatacctttcgtctttggctcactgcagaagttcatcccaactttactcctattttactacagtcaagtctgaagataacatatgagtcacctccaggtttaaagaagaatttaatgcgtacttatgagtcttggactcctgagcaaattagcaaaaaagataatacacatcgagctcatgctctcttcagtcttgcatggtttcatgctgcatgtcaagaaagaagaaactatattcctcagggttggacaaagttttatgaattttctttatcagatcttcgggctgggtacaacattattgacagactttttgatggtgccaaagatgtacaatgggaatttgtacatggtttacttgaaaatgctatttatggaggacgtatagacaactattttgaccttagagttcttcagtcatacctgaagcagttttttaattcttcagttattgatgtattcaaccaaaggaacaagaaaagcatttttccatattccgtatctctaccacaatcctgcagcattttggactatcgtgctgtcattgagaaaattccagaggacgacaaacctagtttctttggtctgcctgccaatatcgctcgctcatctcagcgcatgatcagttctcaggttatttcacagttgaggattttgggcagatccataacagctggttccaaatttgacagagaaatctggtctaatgaactttctcctgtcctcaatctctggaagaaactaaaccagaattcaaacctaatacatcagaaagtgcctcctcctaacgatcgacaaggatctccaatactgtcattcatcattcttgaacaatttaatgctattcgtttagtacaaagtgtccaccagtctcttgctgctctcagcaaagtcatcagaggaactactttactgagttcagaagtacaaaaattggcaagtgctttattaaaccaaaagtgtcctctcgcatggcagagcaagtgggaaggcccagaagatcccttacaatacctgagaggtcttgttgcccgtgcccttgcaatacagaactgggtagataaagctgaaaaacaggctcttctctctgaaacacttgacctatcagaacttttccatccagacacatttcttaatgctcttcgccaggaaactgcaagggcagtgggtcgttctgtggatagccttaaatttgtagcctcatggaaaggtcgactgcaagaagcaaagctacaaattaagatcagtggcttgttactagaaggatgtagttttgatggaaatcaactttctgaaaatcagcttgattctcccagcgtgtcatcagtgctcccttgttttatgggctggattccacaggatgcatgtggtccatattctccggatgagtgcatctctttgcctgtttacacaagtgctgaaagggatcgtgtggttaccaatattgatgttccatgtgggggcaaccaagaccagtggattcagtgtggagcagctctattcctaaaaaatcagtagaatctaatgacaacaaaagccatcttcacaaaagggaacattgattctttaagctttaaatcaaacatgtggtcagtctacatttgaaatgttagttcaaaatattaacatatagttatgttgttgatgtcactgaaattttaatgtgtaaaagcagcactgtgcatcttttaaagtaataaattaatggagttattgttaaaacagagtattcttttgacaacattaaatatttctgtgagaaagttcacttttccagtggctcaaaaatttgttttaggtcagagattttaagtggtatattaaccaataataaatattttggctgtcatttgtgtcataattatttaataaaagagcattcat

SEQ ID NO: 4602 - DNA, 3811 bp, Homo sapiens
atcaatgagatgcaaacatgaaagacaagaggaagaagaaggaccgcacctgggccgaggctgcccgcctggcactagaaaaacaccccaactcaccaatgacagcaaagcagatattggaagtcattcagaaagaagggttaaaagaaacaagaaatggaacccctccattagcctgtctgaatgcaatgcttcacactaacactcgaataggggatggaacattcttcaaaatccctggaaagtcaggcctctatgctctcaaaaaagaggagtcgtcatgcccagcagatggcacgttggatttagtctgtgaatctgaattggatgggacagatatggccgaggcaaatgcccatggagaagaaaatggagtttgttcgaagcaggtaactgatgaagcatcttccactcgagattcaagccttactaacacagcagtgcaaagcaagttagtgtcttccttccagcagcacaccaaaaaggctcttaaacaggctttgaggcagcagcagaaaagaagaaatggagtctcaatgatggtaaacaagactgttcctcgtgttgttttgacaccattaaaggtgtctgatgagcagtcggattcgccttcaggatctgaatctaaaaatggtgaagcagacagttcagataaagaaatgaaacatgggcaaaaatctcccactggaaaacaaacaagtcagcacttaaaacgattaaaaaagtctggtttagggcacttgaaatggaccaaagctgaggacattgacatagaaaccccaggatctattcttgtcaacactaacttgagggcattaataaataaacatacgtttgcttccttacctcagcattttcaacaatacctcctgcttttgctcccagaagtggataggcagtccaggaatgaaccctttcttcaagaagccatggttcccattagtggaggatgtcatgaaatcaagatgtcatgaaagatgggaagtgatggaattttacgcctcagtacttcagctctaaataatgaattctttgcatatgcagcacaagggtggaaacagcgactggcagaaggagagtttaccccagaaatgcagttgcggataaggcaagaaattgagaaggaaaagaaaacagaaccttggaaagaaaaattctttgagaggttttatggagaaaagctgggcatgtcaagggaggaatctgtgaagctcactactggaccaaacaacgctggagctcaaagtagttcttcatgtgggacttctggccttccagtttctgcacagacagccttggcagaacaacagccaaaaagcatgaaaagcccagcttctccagagcctggtttctgtgctactctttgccctatggtagaaattccacctaaagatataatggcagaattggagtcagaggatatcttgatccctgaagaatctgtaattcaggaggaaattgcagaagaggtagagactagtatctgtgaatgccaggatgaaaatcataagacaatacctgaattttctgaggaggctgaaagtctaaccaattctcatgaagaaccccaaatagcacctcctgaagataacttggaatcctgtgttatgatgaatgatgttttagaaactttgcctcatattgaagttaagatagaagggaagtcagaatcaccccaggaagaaatgacagttgttatcgatcagttagaagtctgtgactctcttattccttccacttcatctatgactcatgtcagtgacacagaacataaggagtcagaaactgcagtagagaccagtacccccaaaataaaaacagggtcatcttctctagaaggccagtttccaaatgaaggaattgctatagatatggagctacagagtgaccctgaagaacagctttcagaaaatgcctgcatctctgaaacgtccttttcttctgagagcccagagggagcctgtaccagcctgccttctccaggaggggaaacacagtccacatcagaagaatcatgtactccagcctcccttgagacaacattttgttctgaggtatctagcactgaaaatacagacaaatacaaccagagaaattccactgatgaaaactttcatgcatctttgatgtcagaaatatctccaatatccacttcacctgaaatatcagaagcatctcttatgtccaacttaccattaacatctgaagcatcaccagtatccaacttacctttaacatcagaaacctcaccgatgtctgacttacctttaacatcaaaaacttcttcagtgtcttccatgcttctcacctctgagaccacttttgtatccagtttgccacttccttcagaaacatctccaatttccaactcttccataaatgagagaatggcacatcagcaaagaaagtcaccttctgtatctgaagagccactctccccgcagaaagatgagtcttccgccactgccaaacctctgggagagaaccttacctcccagcagaagaatctgtctaatactcccgaacccatcataatgagttcttcttccattgctcctgaagcatttccgtctgaagatttgcacaataagaccctgagtcagcaaacctgtaaatcacatgttgacactgagaagccctaccctgcttcaattccagaacttgcttctactgaaatgataaaagttaaaaatcatagcgtcctgcaaagaacagaaaaaaaagtgttaccttcaccattggaattatctgtcttttctgaagggacagataataagggaaatgagcttccatctgctaaattacaggacaagcaatatatctcatcagtggataaggctccattttcagaaggctctagaaataaaacacataagcaagggagtacacagagtcggttagaaacctcacatacttccaagtcatcagagccctccaagtcacctgatgggataagaaatgaaagtagagattcagagatatcaaagagaaaaactgcagagcaacacagctttggaatctgtaaggaaaagagagctaggatagaagatgatcagtcaacccggaacatatcatctagcagcccacctgagaaagaacagcctcccagagaggaaccaagggttccccctctcaagattcagctttccaaaattgggccaccttttataatcaagagccaaccagtctccaaacctgagtctcgagcatccactagcacatctgtcagtggcgggaggaacacaggagccaggaccctcgcagatatcaaggcccgggcccaacaagctcgggcccagcgagaggctgctgcagctgctgctgtggctgctgcagcgagcattgtctctggagccatgggaagtccaggagagggtggaaagacgagaactctggcacacatcaaagagcagacaaaggctaagctctttgcaaagcatcaagctcgagcccatctcttccagacctctaaagagacccggttgcctcctccgctcagctcaaaggaagggcctccaaacttagaagtctcttctacccctgaaacaaaaatggaaggttcgactggtgtcattattgtcaatccaaactgtagatctcctagcaacaagtctgcccacctccgggagaccaccactgtactacagcagtctcttaacccaagtaaacttccagaaactgccactgacttatctgtgcatagttctgatgaaaacatacctgtgtcacatttatctgagaaaattgtttcatctacctcttctgaaaatagcagtgtgcccatgctttttaataaaaattctgtccctgt

SEQ ID NO: 4603 - DNA, 3737 bp, Homo sapiens
aggtaaatgcgtgcccggaagcgcgacctcgggcggttggaggggctaccgggtcttaccagtccgtggcgggagtcccggaggaccctcgacgggggagttgccgagaaaaggcctcgccggcattcttcccctccactgggtcctttgaacctagtttggctgggactcgccttcaggcggcgcggaggatttcgaggccctgaggcgcggcccttaatttccggaagtgggggccgcgccgcgccgtcaagatgtgctcgacgcccggaatgccggcgccgggggcctcgctggccctgcgggtgtccttcgtggacgtgcatcccgatgtgatcccggtgcagctgtgggggctggtgggcgagcggcggggcgagtacctgcggctgagccgggaaatccaggaagcggcggccacgcgcggccagtgggcgctgggcagcgcctcggcctcgcccggcgagctgtgcctggtgcaggtcgggcttttgtggcaccgctgccgcgtggtcagccggcaggcacaggagagccgtgtcttcctgctggacgagggccgcaccatcacggccggagcaggctcgctggcgcctgggcgcagagagttcttcaatttgccctcggaagtgctgggctgcgtgctagcgggcctggtgccggcaggctgcggcgcgggctcaggcgagccgccgcagcactggcccgccgacgccgtggacttccttagcaaccttcagggcaaggaggtgcacgggtgcgtcctggacgtgctgctgctccatcgcctggtcctcctggaggtgcctgatgtgttccaacagatgcgggagctgggcctggctcggcgggtgcccgacagcctcttccgttcgctgctggagcgctatctcacagcggccactgctagcgtgggctccggggtcccggttctctcgcgagtcccgctcaagcaaaagcagcctggtctggattacttctatccccagctgcagctgggcgtgacggaggccgtggtcataacccaagtgtgccatccccaccgcattcactgccagctccgcagcgtctcgcaggagatccaccgcctctccgagagcatggcccaggtataccggggttccacggggacaggggatgagaactctaccagtgccacctgggaggagagggaggagagcccagataagccgggctctccgtgtgcatcctgtggcctggatggacattggtacagagcactgttgcttgagacttttcggccccagcgctgtgcccaggtgcttcatgtggactatggaaggaaggagttagtgagttgcagcagccttcggtacttgctgcctgaatattttcgaatgccggtggtgacctacccttgtgctttgtatggactctgggacggtgggagaggctggtctcggtcacaggtcggtgacctgaagacactgatactaggcaaggcagtgaatgcaaagattgaattttattgctcctttgagcatgtgtattatgtcagcctgtatggagaagatgggattaatctgaaccgtgtgtttggagtacagtcgtgttgcttggctgaccgagtccttcagagccaggcaacagaggaggaggaaccagaaacatctcagtctcagtctcctgctgaagaagtagatgaagagatttcactcccagccttaagatctatcaggttaaagatgaatgccttctacgatgcgcaggtagagtttgttaaaaatccttctgagttttggattaggttgaggaaacacaatgtcaccttcagtaagctgatgaggagaatgtgtggtttctattcctctgccagtaagctggatggtgtagttttgaaacctgaacctgatgacctttgctgtgtcaagtggaaagaaaatggttattatagggccatagtcaccaaattggatgacaagagtgtggatgtattcttagttgaccgaggcaattcggaaaatgtggactggtatgacgtaaggatgctgcttcctcagtttaggcagctaccaatattggctgtgaagtgcaccctggctgatatttggcctttgggaaaaacttggagccaggaggcagtttccttttttaaaaagactgtgctccacaaagaattagtcatccatattcttgataaacaggatcatcaatatgttattgagattcttgacgaatcaagaacaggggaagaaaacattagtaaggtaattgcccaagctggatatgccaagtatcaggaatttgaaacaaaggaaaatatcctggtaaatgcccactccccagggcatgtttcaaaccactttactacggagagtaacaaaataccttttgccaagactggagaaggagagcagaaagccaagagagagaataaaaccacatctgtttcaaaagctttgagtgacacaacagttgtaacaaatggttcaactgaactagttgtgcaggaaaaagtgaaaagagcatctgtttattttcctcttatgcagaattgcttggaaattaagccaggctcctctagtaaaggagagctggaagttggaagtacagtagaagtcagagtgtcttatgttgaaaaccctggctatttctggtgtcagctgaccaggaacatacaaggacttaaaactctaatgtctgatattcagtactattgcaaaaatacagctgctcctcaccagagaaacacccttgcttgtttggctaagcgaacagtaaacagacagtggtccagagcacttattagtgggatacagtctgtggagcatgtcaatgtaacatttgtagattatggagacagagaaatggtatctgtgaagaatatttattcaattagtgaagaatttctgaaggttaaggcacaggcttttaggtgcagtctttataatttaattcaaccagttggccagaatccctttgtttgggatgtaaaggcaatacaagctttcaatgaatttatagataatgcatggcaaaaaaatctagaattaaaatgtacaatatttgctctggcttcaattaatgaagaactgtttaacattgtggatttgctaaccccctttcagagtgcatgccatttcttggtagaaaagagacttgcaagaccagtaaaacttcagaagcctttggagtcctctgttcagctacattcctacttctattctacacatgatatgaaaattggaagtgaagaattagtttatataacgcatattgatgacccttggacattttattgccagctggcaagaaatgcaaatattttagaacagttgtcatgtagtattacacaattaagtaaagttttgctgaatttaaaaacatctcccttgaaccctggaaccttgtgccttgccaagtatactgatggaaactggtataggggcatagtaatagagaaagagccaaagaaagtcttctttgttgattttgggaatatttatgtagtaacaagtgatgatctgcttccaatacctagtgatgcatatgatgtcttacttttgcccatgcaagctgtcagatgttcattatctgatattcctgatcatataccagaagaagtggtggtgtggtttcaggagactattttagataagtcattgaaggctttagttgtagcaaaagatccagatggaacactgattatagaactatatggtgacaatattcaaattagtgctagtattaataagaagttggggctacttagttac

SEQ ID NO: 4604 - DNA, 4540 bp, Homo sapiens
tttgctttaacaacaagtgggggtggttgaatttactcctccctctcctctctcctccccttcctcttgctgcggttcttgacactactacaaaccaggactataaacataaacatgtgtcactgtaacagggcaggttcccagtagctgcagcagtgaaagacagtgattggctccagtgctcccagaaggatttgggctgaagccaggggaacagaaccagaagaggattccctttccagagaccatcaggctcctcatgtcttgtctctcctctctcccctcgtggtggctcaggatttcagtatggctgagcagcccatagagtcagctgacatggtcaacaaatttatcaaagaaaccccctggcttttgaagaatagtactttatacatctggatctgcacatcaggcaaagctcagaaatatccgtttattcttttaatcacgcggatgtgtctatttttggaggaacaaggaaacacataaatgcctgggttgcatttatgttgtagttgcaaacactgaacagttaagaagattttgccgaattttgcaaagcagccaaggagccgccttgggatcgtggtaatgcgactgggaggacccttgctctcatttggcaatattttggatatccttgaaaacgacaccaaaatttgccttaatttgactaagaagaggttaaaccacattgattttcatccaaagtgattttgttaaagcagatgcttgactttgatggaaaaactgggagttgtggaagatttacctaaactaccaaccaaaagcatcacaaaccactgaaacagtctgcatcgtacatcagcactttcttttcattgttattacgtaaaacctctggaagcaccttgggcgtttgacagtttcttttctttgctgcagaaggaagcaatctgctccctggaattctgacctgtggtgaacaggaccctggcaaaggctttgctggggactcttggacgatcccgcctccaatccagtacggttaattgtggaaaagtgttcacatttctggcttatctatgctttgttatgggtctgacgtgaaactacctcctccccaccccaccccccagcagagaaccgaaatccagttgaattgttacagtgtttcggagctggagccttgaactgcttccttggtcaaataactttgtttctggttgtaaaaaggcatttcaggaaaaaaaaaaaaaaaaaaggaaaatcgagagaaattccaaacgtaagtccgcactggggtggttcacggggcgggtttaactttggagctcccagccggtctccttccccactcctgtaagggaaataccaggctattctgcacattttcccttaagctccattttccaaaaggaaaagggggtggggtatctctctttcggcttgataatgttttttaaatgcttttctttgaaatgataatagctgtatcggtaaaatgcaaataaacgaaaaaaataggcagtatttctttaaaggcgaatatacggtgcggtttttttttttttctcccttaagcgtacacacactgcttctgatgaagtctgtgagtcaggctgtttctgagctccgatagtttaatggaaagatttatataccgactgtattatttactttgggaggggaggtggcagtataagggtatgctaattagtgggagattttggggggaaggggtggaatatcaatttttattgcatcacctgtcaggagtgtccaatcagcgctggctttaggggaattaattgatgaaggtgtctccggacgagctcacttcactctgtcattttatttgtagctaaagcagcggcgggaatagcagctgcatttcttttctctttctcccttcacattccattatcatagtgctccaatggagaaggaaggaatagaggggcccaggtactgatctgcatcggggactcagaccaacacactggcagatcagaaaccggatggttttttccctcttttttaaaaaaacgaaaacaacaacaacaaaaaagcaagaatcaagtcagtgtaatttcatggggtttccccccccccaataatttcgcctagagtttggcacttccttcgccgggaataacagtctttgttattttattagcaggatgccttgagacacacgcagcatctggctgaggattaacatacatacatgtgtatgtatgcgtcacgtatatatttactgcaaatggtggggatcatttagtgcccgagatgggagacctgaagtcaggttttgaagaggtggatggcgtgaggctcggctacctcatcattaaagggaagcaaatgtttgccctctcccaagtcttcacagatctgctgaaaaacatcccgaggacgaccgtgcacaagcgcatggatcatctgaaagtgaagaagcaccactgcgatctggaggagttgcggaaactcaaggcaattaacagcatcgccttccacgccgccaaatgcacgctcatctcccgggaagacgtggaagcgctctacacctcctgcaaaaccgagcgcgtcctcaagaccaagcgcaggcgggtcggccgggccctggccacaaaggcgccgccgccagagcgcgccgctgccgccagcccccgcccgggattttggaaggacaagcaccaactttggcggggcctgagcggagccgcgcggcccctgccaatcagcgcgcagtcccagcgcccgggcgccgccgccgcgcgccccgccgcccatctacctcagatttttagcaaataccccggctcgcactacccggagatcgtgcgctcgccgtgcaaaccccctctaaactatgaaactgccccgctccagggaaactacgtcgccttcccctcggaccctgcttattttcggagcctgctgtgcagcaaacacccggcggcggccgccgcgggggccacttgcctggagaggtttcatctggtcaacggcttctgcccgcctccgcaccaccaccaccaccaccaccatcaccaccaccaccaccaccaccgggcccagccgccgcagcagagtcaccacccccctcaccaccaccggccgcagccccatctgggcagctttcccgagagctgcagcagcgactccgagtccagctcctactcggaccacgcggccaacgactcggattttggctccagtttgtccagctccagcaattctgtgtcctcagaggaagaggaggaggagggagaggaggaggaggaggaagaggaggaggaggaggaggggggcagcggggcctcggattccagtgaagtcagctcggaggaggaggactcgtccaccgagtcggactccagctccggctccagccaagtgtcagtgcagagcatccgattcaggcgcaccagcttctgcaagcctcccagcgtgcaggcgcaggccaacttcttgtaccatctggcctccgccgccgctgcaaccaaacccgctgctttcgaggatgccggcagacttcccgacctcaagagtagtgtcaaagcggagtcgccggcggagtggaatctgcagagctgggcccccaaagcatctccggtgtactgcccggccagcctggggagttgtttcgctgagataaggaacgatagggtatctgagattacattcccacactctgaaatttccaatgctgtaaagagaactgacctgacaattaactgcctggcagagggggcctcttcacctagcccaaagacaaacaatgcatttccacaacaaagaatactccgagaggctaggaaatgcctacaaacaactcctactacacactgtgcagataacaacacaatagctgctaggttcttaaataatgattcttcaggagcagaagcaaattcagaaaaatattccaaaatccttcattgtcctgaatttgctacggatttgccctcttcgcagactgatcctgaagtgaacgctgcaggagcagcagcaactaaagccgagaatccctgcactgacacaggcgacaagacattgccatttctgcacaatattaaaatcaaagtagaagacagtagtgctaatgaagaatatgaacctcacctttttacaaataagctaaagtgcgagtgcaatgatacaaagggtgagttttacagtgtgactgagagtaaagaggaggacgccttgttaaccacagccaaggaaggttttgcatgccctgaaaaagaaactccttccttaaatccactggctcaaagtcagggcctttcatgcactttaggttctccaaaacctgaggatggggaatataaatttggtgccagggtgagaaaaaattaccggacactagtactgggaaagcgacctgtccttcagacacctccagtcaaaccaaatttgaaatcagctagaagccctcgtcctacaggtaaaactgagacaaatgaaggaacactggatgattttacagttataaacagacgcaaaaaggtagccagcaatgtagcatcagcagtgaaaaggccatttcatttcatggcaaataaat

SEQ ID NO: 4605 - DNA, 4808 bp, Homo sapiens
atcagatgtgccaggcctgccctctagctcccaacaccatctgcctgatctaagctttgccatgttgttgtcactgctgggtgcctgtgctgtggtggggccattccatggccctgagtgggagccagtgcagggcctgctctcccagaatcacagctgcagggaccctcagtgctgtggcaacctgcttgtcctctgcctctttctggtctggcaggtccggcactgttggcaccaggtcaccaggacccgcttcagcacaaggaatgtcatcaaggtgccactgcagaagcgggcagtgccctccatgaggtgcgaaactgtcttcaagctgactcctgaattcttcagtcctggaaagtccaggggcctagattctcaacaatgcgcacaaaggcagagatggggataccggaggagcctccaggaatcacgggcccagaacctgctctctccacagcacccatgtccaggcccaccttcgggtgtccacacccactctgagcccatcttttgtaccacctccatttcaaacacctgtttactgcctcagaacagttcctggaaagcatggcaggtgccttggtgtctccatgatggtcagactcgccctgccttggacatgtgtcaagagatggagcagctgctgcttcactcacaggaaagctgagaggctgcagttctgcccccagagagctcctgcctgatccttcccaccaaacactgagaatgtgcacttggaagtcttggcactgtcgaccagaggcctgggaaccagggggtaaaaaccagacagcaggcagagaggatagtagagagacccaggctccaaggtgggtgaaccagtagactttggaatggagggtgatgcagagactaacgtgttggagtgtgcaaaccagagactagtaataagtgaaactgatggcgagatcttgacaccagggtgggacacccaggaccggatgggagttgagagtagaaccaacattcaggaactagggaatagaaaccagagggaggctggaggtgagaatctccctgaaacccaggcacatatgggagagaaccaagaacagttaagatgtaaaattgatgcagagacccaaacacctgagtgggagaaccaggataagaatggaagtgaggatgctgtggagacccagacatttgagaagaaggacaagaaagaggctggagaggaggatggggaagagatccaggctcaaggattggggaagcaaggccagactggagatgagaatggtgaggagacccagacaccacagtgggagaaacaagatcagatgaaaggtgatgcggatgtggaaattcagatggaagaggggagaaacaaggatcaggttggaggtcaggatgctgcacaaacccaatcatgtgggagggagaacgtgggagaagtaaaaaaagagaatagtgtagagacccaggccttggattggggaaaacaggaatgtgttggaaatgggaatgttacagagatccagacaccaaggtgggagaagcatgatcaaggtggaagtaagaaagctaagaagacccaagcatctgggggagagaaccagaaacaattaagtcatgaaattcaagtggggtggggaaataagggcctgagaagagatgaagatgctaaggaaacccagatagctaccaagaagaagctcagggagataagagagaaggattgggtggtgatccaggcactatggtggggaaaccggagacaagtagcaagtgaaatttatagagaatttgagatactatgttgggagaatcagaactggattggaggtgaacatagagcagaaattcaggcatcagagaagagagaccaaagaaaggatggatgtgaggatggcacaaatatcctggcacccgaggctgagatccaggaacaattaaaaggtgaaactgatgtggagactcagagcaatgagccacttagagaagaggatggtacagacattcagtcactagggaggagagaggttaaaggtgaggatgataaagacacccaggaacttgggaggaaaaatcagggtcagttaggaaatgaatttagtggaaagattcacataccaaaggggaagaatcaggaacatattagaggcgaagatggtgcacatacccagatatctgagtcagggaactggggcaaattaacaagtcaaattgatggagaaatgcattcagcagaatggaagaaagatcagcagattggaggtgagaatggggcagaaattcagatacaagggaagagaaacctgagagaagttggaggtgaggacggtgtaaagacctgggcacctgggaaagaaacccagagtcagtttagaagtgatcttggtagaaagatccttttatcagagtggaagagccagaagcagatgggaagtgagaatggaacagaaattcaggctccagtggagagaaaccagagagaacctggaggtgaggacggtgtaaagactcagagacctaagagagagaacgaggaccagttagatagtgaaattggagggagccattcaccagggaggaggaactgggagctgattggaaaggatgttgcagaaaatcaggcatcagagaagagaaaccagagagaggttggaaacgaggacggtagaatgatctggaggcttaggggaaaaaactggaggcttagagcgaagaaacagactgttaaaaagtaaagataatggaaagacccgtttatcagagtggaagaaccaggaacagggtggaggtgggaatgatgaagaaattcaaatacaggggaagagaaacctgagagggaccacagctgatgatggtacagagacccaggctcctgcaggagatgaccagggacagttaagagttgaaattgatgaagagatccaggtacaagggcaaggaaataagaatgacggtggagttgaggatgttgcagaactccaggatataggaagccagagaaagtgcacagatgaggatgttggagagcctcgagcaccaaggggaggaaacaaggatctggtcagaggagaggatgctgtgagggacagtctccaagtcgactgttctgggagtgagaggcccacaggcaggaagcacagcctaccatggcctccagccttcactggctatggatgtgggacccgggaacaggaacaggcagtggctgtgaatggtttcatctctgccccctgtcctgagatgaatcctgtcccccactggggtgaagtcttcctgctggtgggtggggagggagagcatctggccagccagggcacaacccctgccagggatcatagagtggggatcagtccagcctcccagcaggcccaacctgaatcctggagaagacgacaaagggacaaaggggtggatccagagaaggcccccagcctgactcggcagtcccaaaaccctccgtctctgacagctcccttgggcatgccctctgcctgctcctgtctcccgtgtggcccagccccggaagctgccatcattctagcgggtcctcccaccgccctcactgtcctgcccaaggggacaggcctcaagaagagcaaacgactgctcctggagtccctcatgcggaggaggattgcacacctgaagtggggtcttccccggcggatcctggagtcctatttcctgtttaacttcttaggatcttgctcattgacccttgctggggcgaggctctctggactgaacacaggccaggagctccaagcccagcaggaaaggtattgtgaggcccaaggctccccaccaggccttaagtccccagagaggttccagagggttcagcgcccagacagaaaaagctcgaaacttcctatacaagccagagctctggagaggaacagaccgcacatgtcagagcccattaagcatttccatccagcctgaaaaggccaggagagtcaggccaccagggggcgccagagaaccacaggagatccaggaagcgcttgctaggaccaagctcccagctcccaggacccccaggccggcagcggagtccaggagctggtgtggcccacaaagggtcggagagcctcccagtgagaacagtaggggcaggaaaatgatcaggtcaagggtctcccagctggcagagagggctcccagcagagtgaggacttcattctctagggcagaccacgcccactggaggaaggaatgtacatcctgggaggcctctaagctccccagactcaaatgccagcagctcacatactggagaagaggaagcctggaatctacagggtgcagaggggctgggcagcagccttcctgccattctgcagaacctgtcagcttcaaagggaggctccactctgcggtggcaaagctgggcctgacccttctggccaagatgtcctggtccccacagctcgccaagcgcaagcacttggcccctaacctgagcctgagggaacctgattctactctgcctcccaaagtgggtgatcctcgtgcaggggaggacagcatcggagatcacactgcttcacagagggatcttcagctgcaaggtcactgctgtactggggccacccttcctaagacagagagtccccagggccaggaggcacctgggaacccaaatggggctccacagaatacacgagcctccaaaaagtttagtattatgaagcatctgaatttttttctcttccagaatggctttaaaaagtagactcaggcccagagtcctcaggacatatcagaaaagctttgagagtgtcctgatccctgcaaagcctctaataaattggtcatttggg

SEQ ID NO: 4606 - DNA, 4000 bp, Homo sapiens
tttatgctgcacaaaagctgtgagtcttctgcctggggaacccccacaaaaagttccaacaggggtctgtggacacttgccagtagggacaatcagattacttctaggtagatctagtttaaatttaaaaggagtgcaagtacatacaggagtcactgattcagattacaatgggaaattcaaattgttatagctacttctgttccctggaaagcagagccaggaaagcacaactcctgattgtgccatatgtggaaatggggaaaagtgaaattaaacgaacaggaggatttggaagcacaaataaacaaggcaaagcagcttactgggtgaatcaaagtattgataaatgtcctacctgtgaaataactattcagggaaagaaatttaaaggattggtagatacaggagcagacatttccatcatttctctacaccactggctgtccgcatggccaattcaacccactcaatttaacagagttggagttggtaaagcccctgaagtatatcaaagaatctgtattttgcattgtgaagggcccaatggacaacctgggactattcgatcaattgtaacttctgtacctataaattaatgggggagagattttactgcaacaatggggagtacaagttctaattccagggcaattatatagccctgaaagtcaacatatgatgcatgaaatggggtatgtcctaggaaaaaaactgcagggtttgaaggaactgctccaagcagaaagacaaagttcccaccaaggtttagggtatcatttttgatggtggccattgttaagcctccagaaactatacctttaaaatggttaacagataagccaatttggatagaacaatggccgctaagtaaagaaaaactggaggctttaggggacttagttactgaacaattagaaaaaggacacatagctccaacatttcccccttggaattctccagtcttcgtaattaagaaaacatcaggtaaacggagaatgttaactgacttaagagccattaattcagttatataacctatggggacattacagccaggactgccttctcctgtggattccaaaaaattggcctttaattgtcatagatttaaaagactgtttctttactatccctttagctgagcaagactgtgaacggtttgcatttacaattcctgcaataaacaacctgcagcctgctaagcattttcactggaaagtgttgccataaggcgtgttaaacagtccaacaatttgccagacttatcaattgaaaacattaaatgactttcaaaaagtactaagggatatcaactggatacaacctgcgctaggcattcctacctatgctatgagtaatctgttttctatccttagaggagatcctagtctcactaggcaattaacaaaagaagctgaggcagaggtacagctgattgaaaagtaagtccataaagctcagataaatagaatagatccagagaagactctagatttgctaattttttcaactcagcattcacctactggtgttattgtccaagagcaggacttagtagaatggctttttcttccacatactaactcatggactcttaactccttatctggatcaaatcgctactatgataggaaatgggagaactcggattgttaaattacatggatatgatcctggaaaaattattgtccctctcacaaagacacaaatacagcaagcttttataaacagtcttacttggcaaacccattagctgactttgtgggtattctcgataatcattttcctaaaagaaaactatttcaatttttgaaattaactaattggattctccctaaaataactaaatttaaaccaattgaaggtactgaaaatgtcttcacagatgggtctagtaatggtaaagcttcttattccagcttgaaaggtaaagtttttcagaagccctgtacttcggctcaaaaagcaagagcttgtagctgtaagtgaggtattgactgcttttgatatgcctattaatgtgatttctgattctttgtatgtggttcattccacaccattagctgaaaatgctcagttgccatttcatacagatgaacaactgatgactttatttacccaattgcaaacagcagttagaaatagaatacaccctttttacatcactcacactagggctcatacacctcttccaggacctttaactgaagggaatcaaatggctgatggcctagttgctactacaatatctaatgccagacactttcacaatttaacccatgttaatgcctctggtctcaaatgcagatacagcattacctggaaagaagctaaagctattattcagtgatgcccaacttgccaaatggtgcattcctcatcttttataggaggagttaatcctcaaggattggaacctaattctctttggcaaatggatgtcacacatgttccctcgtttgggagactagcttatgtacatgtatgtgtggacaccttttctcagtctgactgggttacatgccaaacaggagagtcttctgcctgtgttaaacgtcaccttttgcagtgttttgcagtgatgggcattccagcttctattaaaacagataatgccccaggctatactagccaagctctagctacatttttctccatatggaatattaaacacattattggcattccatacaattctcaaggatgagccacagtggaaagaatgaatctgtccctgaaacagcagttgcaaaagcaaaaagggggaaacagggactacaggacaccccatatgcaactgaatctagaattattgactttaaattttttgagcctgcctaaaggccagatgctatcagcagctgaacaatatctacagaaaccagctgcaaagacagaagcagaacaactggtttggtggagagatctgataacaaaaagttgggaaataggtaaaataataacttggggtagaggttatgcttgtgtttccccaggatgaaatcaacagccaatctgggtgccattgagacatctaaagccttactatgagccagatacccaggaagaggttttgggaggatcccaaagactccctggttgcagccatgtcaagactgatgctgaggaggaccccaactgtcacgagcaacaactgcctggggacagatcaagaagctgtcacagatggcagagaaaaacctgagaaaagcgggacaaccagtcacaatgagtaatttaatgatagctatgacagtggtgatcaccattgccatgagtattccttcaacaagggctgacacagagaacaattacacttattgggcatatttatcaatcttggctggcaataatgcctggatgtgatcactctatgacacagttacacatgctttctggtctcagtatttaccataataatctgctcctataattgaggcatactgccctcaaaaaactatttgtaaacaggattggacctggtcagaaaaaatgaacgtacttgtttgggaagattgcattgcagaacaggcagaggtgctgcacaacgattcctatggagtcattattgattgttcccctaaggggatgtttagcttgaattgcacctctcagtctgcctgccatggccacactatgttcagctggtctgaacaaaatggtcagatggtagaaatgataagaagtatggcaagagttcctattatctggaaacatggtggtatagtggcacctcaacctcaaatgatatggcctgctgtaggagctaaacataaggatttgtggaaactattaatggctcttaataagatcaaaatttgggaaaggataaaaaagcatctagaaggacactctagaaacttggatattgcaaaattaaaagaacaaatatttaaagcatcccaggcacacctgaccttaatgccaggaactggagtgcttgaaggagctgcagatggattagcagctattaacccattaaaatagataaaaacac

SEQ ID NO: 4607 - DNA, 5137 bp, Homo sapiens
aaggtgcccggcgagcggagaaagggagcagagggggcgggaggagggttcgggagcgcacgccacgtgacccggcggccaagttcgctgcgagtttgacagaagtttgaatccgagtcgggggctttctgctgccggcggggcaccgcggcggccgcagcctctgagagcacgaacagcagcgcccccgcgtcccagccagccagccagccagactggactccggcccaccgacggccgctcgcgctccggccccgctcgcctgctctgccccggacctgcagctccccgctcccccgccgtgtccgccgcctcccggccagagagccaagccactacgccgcgcccagcgctcgccgcgccagcatgtcctcgaccgagagcgccggccgcacggcggacaagtcgccgcgccagcaggtggaccgcctactcgtggggctgcgctggcggcggctggaggagccgctgggcttcatcaaagttctccagtggctctttgctattttcgccttcgggtcctgtggctcctacagcggggagacaggagcaatggttcgctgcaacaacgaagccaaggacgtgagctccatcatcgttgcatttggctatcccttcaggttgcaccggatccaatatgagatgcccctctgcgatgaagggtccagctccaagaccatgcacctcatgggggacttctctgcacccgccgagttcttcgtgacccttggcatcttttccttcttctataccatggctgccctagttatctacctgcgcttccacaacctctacacagagaacaaacgcttcccgctggtggacttctgtgtgactgtctccttcaccttcttctggctggtagctgcagctgcctggggcaagggcctgaccgatgtcaagggggccacacgaccatccagcttgacagcagccatgtcagtgtgccatggagaggaagcagtgtgcagtgccggggccacgccctctatgggcctggccaacatctccgtggtgagacctgtggccactgcaggaagcagcaccagccctgctgcccaggcctgtcccagctagcaggtcctgaaaggaaagagagggtgtcccagagctggtgtcccctgcacctggagctggtgccctcactgcgcttcatgctggctgctggctcctggctgaccctgagaggacattttgggatgaggggaacccaaaagccacttagccttctgttccttcctccttctgcactctgcctccaattcccttctcatttccccacctctaggcacgctctctgtgatgtctcccctcctcctgcctgttctacacaatgtgtgtgaacacataaaggggagcctggggctgtggctgagcttgaagctgcgagcagacccagcatgagtgggaaggggcttactgtcactcagccctccagcctggaaaggggctttggagcagtagtgggtctgctggatgcatatggatttggccatcccagttgttagaatgttgaaatatgtccatatccattggtaaagagctgaggtcttgagcttctcaaatgctgcccgtcatcccagccacctcagccctgctctgaaaatgacttgttcccacatctgaaatgtttaatggctggcacaccaggaacacacgtctggaacttgctggaaccctgcttatggttcccccccaaaaaaattttattgtagaaatgttcacaggtacaacaaagttgaaagaattttacagtgaatacccatgcactcaccacctagactgtgccattaactttttactagacttgctttatcacatatttattcacttcttcatccatcaatccgtcttgtttttagtgcatttcaaagataatttgggacatcagtacacttccctctaagtacttcctgctgtgaggtttttaaaatatgttgaataactatttgaacatagccctggctaggtgcctgatcacagggaaggagcaccttggacagctcctgccacacctacctggcggaaggtgctccgaacagggcctcacgcgtgctgtgggaggcgccccagggctgacttttgcttggctccttgctatgctttgcacgatgctcctctaaagggtcagattctgctagtgaccaagctacagcttgggtgcatggtgtggacagaattagacactttcacctgggattcccctaaacagttgatggccctgagccctgcctctataccgagctctctgtcttagtctttctagtcctctgtgcttcttccctgcacaagccccaaccccaactgcaataggaactccccctccctgttcccacaatgaccccctgactattctcacaaattcccctgatgtctttgcagctctttggctttatcaacttcttcctgtgggccgggaactgttggtttgtgttcaaggagaccccgtggcatggacagggccagggccaggaccaggaccaggaccaggaccagggccagggtcccagccaggagagtgcagctgagcagggagcagtggagaagcagtaagcagccccccacctggctattcccgaactggacagcacctcttcaaccacctccggcttccaggacctttctcttcctcctcctccaattcccctcccccatcattctggtctttgagctttgagacgatgggcaggcatcagctgttggaaacctgggcagccctctcagtggcttcctatcctccttcttgctggagccatgaatggcaggagctcagtgcttcttgtgcagtgcctggacccaggtatcttacttggggtcttacttgtacccttacagtctctgagaaccagcctctgctgcaggtgagggttgggggcaggaaaccagtgctctgagactggttcctagcagccacctttctgtcaacctgtccggcttcaacaatattagggggaagggaaatcagctagtagccttcccctctggtcccttgtgtggaggccccaatagtggtttggcgacccctcctcagtggctgtcatctagtccctgcgtctgatctccagtcatcccatgactcagtgtgccttccactgtcttctctggcctctgcctgcccacagaatccaccatgtgtgaaccagagaggtccaccagcctagaaaacagcccttcagagggtcctgatgaggccttcctggactcagctgggagcaagataaattgcaactgagttgcagcttcaagaaagtaaagccagtaagcttgctggcagaatcaatttcttctatcccctcaatcctcccacccaccaggctggggcactttccaccaacactctaaactctactttagaaacgccctatcttcctccctgtcctccttcttggtctcacacttgggactcaaaaatgtggagtcaggacctgcctcctaatccccttacttctctgtccatctcccttccccagcatcgtgcatctgaggcatttgagatcctttttgaagtctgtccaggccttccttttattcctgtggggccagacaggggcttaggaagggccaaaggaccatcatgaggctaagttgccccagagccccaggatggatgggcccattttttccttattccctgctcagttttttcccctgctccttctctagtccttctttcatatttctccttctcatcttgaaaacaggatgttccctcttcccttgctgtcccatttctcccctgtgtccttatttctcccagtctctatcccctctcaagtccagggcaggccgatgctattggtgcttcttcactttgggacccagttccatatttgtctttagtgtatatcctcttcctgatacctccttcagtccctctctgggccccaaggctgagaatcagtgttaactgggtaaggatcatttgcttcctacccagctcaatctgccctggccatagggcttcccagggaaggaagaagagggaagaatccaaccactttccaatccagtgccaattggcccactaagcatcctaaaggtgaatgtgccctgtgccaatctctcctcaggactgagtcaacccccttcaacctcctcacctctctaaacaccatccatagtaacatgtgcattactggggtacctaggagtcaggacttttgacttcaggccagtcatttcctcccgatggggaaagggtgagatttacatccccaaatgcttgagtccctcagtgaaagaattagtttttgtttgtttgtttaagattttggggaagagatttgaggaggaaagaaaggagatggggtgagagggtttttaagtctgaaactctctgtcatgagctgtccccatggttactcaaggacaaggggggacagttttgcctacagctccagagacacagagaacaaaggggtgaccttcatttttcttcaagccggcctctgtgggggtctgtgagcagcttctactggatctttgtttggattctgtgtctgtatttataatttatttgaaatgtgctgggtagtgttctcatttgggggctgaggttagcaactgggccttcagctagggaaagcagttgcgggcagggggtggggggagattatattcactcctgccaaggactcccagcccaggactctctttagagcaaggaagcctcgttctctttcttctcaagaggctctcttgttctccatcaggagagccttgatttaggctacggcctcactctctatggccaccctaagaggaaaggctacttcacctcattacctccagagggctgggcagggccaagtgcctcataggactcatgttctctccaaccagggctggcatcactgctttgcaaagtggggcctgaggtagaagaaggtgtctggtttctccagctgctgtaggaggctaatgggcagggtacttgccctttgtcccactagactctaacccagcaccagggtgcccacctaggacctttcctggacatgagtttccttcactatcatagtcatgagcctcctacttctgggattgcagatcaggggtggggggagaatgttgcatgttgttttctggtgcttgttattatatatttgaataaacagtgctgcaagtacttgccatg

SEQ ID NO: 4608 - DNA, 5100 bp, Homo sapiens
tttacgtagcctagttggttgtttgaaatcagtcataactaggtaagactgggtcttggctttttctcttatttttcacactttttttcttaggctttcttatttattctcatagttccacctaatgtgttacttacgatttgtatctctagaatccctcctgagctccaaaaacaaattgccagctgcctattgtacattattgctggaatactgtaccagtagtacatcaaacacaccatgtcaaaaactaaattttcctttctcttttccccttcctttctgccataagagtttcttctgtcttgtttgcttaatataccattattctcaaccacataaactcaaaatcttggaatcatctttgattttatccttcacctttacttctcatatcccaagttctgttgcttatttttttaaccttctattctgtcccttcccattgctaattttctctgttactgatctttggtattactggcagagatagcctcctgaaactcattcagatcgtataattcacttcctcaaaaacctgcagagacttaccattatttgaagaataaagttcaaactaacttgcgtagaatttatgttttccttggtctgtactgcatcttcagctgcacatacttctactgactccatccccccaaacataccacattccagccaagggtggggcggcatggttgtatgttttctacacatggatttgttcatgaggttacttcagttcatgaggccagttagcaaatctctacttaatagtgttcatttcatcctatctcatatgatagttagaagttgacatattgccttctcccacctgattgaaagttctttgaagatagaaaacatgacttaacgtttccttcagtattttgtataggacagaaacatttttcatagaattattttgactaattagataaaattttaaaactaagtttatacagtggggtctccccccaacttttcattctaaagcacacttgttattttataaaccgagttgtggcagtattccccatctaggtccataacactgtgttataggaaataaacttctatacgatgtgatcaataaaaatggaactagaatacaaactgttaaagcataatcttctcaattttttttttcagagagacacatctcaattcaaaggcagcttgctgatctagagaatttagcttttgtaactgatggaaattttgactctgccagctcattgaactcagataatcttgatgcaggcaacagacaggcttgtccattgtgccctaaggaaaaattcagagcttgtaatagccataagcttcgtcgtcacctccagaatttacactggaaagtctcagttgaatttgaaggttacaggatgtgcatctgtcacttaccttgtcgaccagtgaaaccaaacattattggagaacagataaccagtaaaatgggagcccattatcattgtatcatttgttcagcaacaatcaccagaagaactgatatgctaggacatgttaggcgccacatgaataaaggagagactaaatctagttatattgcagcttccactgctaaaccacctaaggaaattttgaaagaggcagacacggatgtacaagtttgtcccaactattctatacctcagaaaacagattcctattttaaccccaaaatgaaactaaatcggcagctaatattctgtacattggctgctttggctgaggaacgaaaacctttggaatgtctagatgcttttggagccactgggataatgggattacagtgggcaaaacatcttggaaatgcagtcaaagttacaatcaatgacttgaatgaaaattctgtgacactgattcaggaaagctgccatttaaacaaattgaaagtggtggtggacagtaaggaaaaggaaaagagtgatgatattcttgaagaaggagagaaaaatcttggtaatattaaggtgaccaaaatggatgccaatgtactgatgcatttgagatcttttgatttcatacatctagacccttttggaacatcagtgaattatctagattctgcattcagaaatataagaaaccttggcatagtgtcagtgacttctacagatatcagttctttatatgccaaggcacagcatgttgcccggcgtcactacggatgtaacattgtccgaactgaatattacaaggaactagcagccagaattgttgtagctgcagtggcaagagctgcagcccgatgcaacaaaggcatagaagtactgtttgcagtggctctggaacattttgtgttggtagttgtgagagttttgaggggacctacttcagcagatgaaacagccaagaagattcaatacctgatccattgtcagtggtgtgaagagagaatttttcagaaggatggtaatatggtagaagattacagtgctaactttgttatttcctatactggatttcctttcgtcaacagacaagacattcgtaaaacccacatagacagctgccttgtaactgtcatggaagcatgcctggaaagacagcaatagaacttggacctctgtggtcaagttcccttttcaatactggattcctcaaaagaatgctatttgaatctcttcaccatggtttggatgacattcagaccctaataaagacattaatctttgaatcagagtgtacgcctcaaagtcagttttcaattcatgcatcttcaaatgtcaacaagcaagaagaaaatggtgtatttattaaaactacagatgacaccacaacagataattacattgcacaaggaaagagaaaaagtaatgaaatgatcacaaatttaggcaagaagcaaaagactgatgtcagtactgaacatcctcccttttattacaacattcacagacacagcattaaaggaatgaatatgccaaagttaaaaaagtttttgtgctatttatctcaagcaggctttcgagtaagccgaactcattttgacccaatgggtgtacgcacagatgcacctctgatgcagtttaaatctatccttttaaagtacagcacccccacctacactggaggacagtcagaaagccatgtccagtcagcatctgaagatacagtaactgaaagagttgaaatgtcagtgaatgacaaagcagaagcaagtggctgcagaagatggtaaacgtagagaagaattggttctcaggtgtctgtatagatggcctaatagttctctataccaactgtagttctttttctgttctttcaattcagtagagtaaaaataaaaaacagtgtcattttcattcagaaactgagcagtttctaacttagctggtttgggagctttgctttccaagtttttttttgttttaaggcaaacttaaaattttaatggaaacatttcatatgaagccaagtctcactgagatcaccctactgcttaataattcagaaaattttcacatgcaaagtgtttggaattttatgtatgttatgaaagccatcttttacaattcttaatcacatctctgcctaaactgattcatgatgtttatgttttcctgtttgtagtgtacaaaatgaagctgaaggctcacatgttaaaatgaccctgaatagaataggaagaacagtgttcttacaggtcataatgtatttcacaattaaaaaactaaaatatgtacccatttttaagaaatcatacttctctccacattgatcttttcatttcttactagcttttaagaaattaaatacttgcctgagatagaaatactttatttttgtaactttaaggtctaaatgactaaacttcaaagtaagattttgtcagaataaattgagaccattaatctaatataatacttgttcatgagcactgaaatcctgaagaggagagatttggttataaattaaaaaggttgggtgatcttaagtgcctcagttaatgcacgtacagtattcatttggttggttgtactacctctcagaagtaaaatttgtcaccttatggaatgagagtttttgggtttgggggttgtttttttgttgttgcttggtttggtatttttggttttgtgtgtatttgtataaattttctgtataattagcccaggctgatgtaactataaaaattagttgaaaaaaaaaatattgtttccttaatggaattctcacttcatttgaatataagattttggatgaaaggatttggtataaagtttgggtttttgtctcaaggatttgatccatatttatccctaaatatttcttaagggatgtaactttttataaccattaagtggggggaagggggtggagggggtggtaataattataactgaaaggtttaaatatactacctaagaaaaaagtacttctgtgacatatacaaaaaaatctagtggataggcattagatgaatagagaatattaattttgcagaaatgaaggaaaatctcttcgtgctagtacagcgtattcccaagagagtttattttcctttctccaattaatgtggtcataaatttcggtaaaatcaagaaataggtgaagtgcaagctagtttctataatgaccattaaaaaaattctgctgtgtaattcttgccagttaaaattataacttgcaaatgagcagaataaatgaggtttttttcaattaaaaattactataaatccaggaggcaaactattatagcactcagattatctgatttaatacatattattgaatatcagtctcaaattttgctaaatgcttatcagcatgaaatatgttgatcagtgatgagttgggcttaatgcaaagatcctaatttaataaagaaacctgtaaattactgttacctaaaatatatgtgtatattaatttcacatataaaggtagatttttcaaagaaaaatttggtaggcggtagtttagaactctgatcaggtactacatcaaccaaaagaggaaatactttaaaaattccttttagcaacctgagcaatcttattctcgtaacaatagtagtaatttgggacattgcaaatgtttatcatgttgtaaagtagcatcagttgtatcctttcattaaaacttgataaacaaaag

SEQ ID NO: 4609 - DNA, 3818 bp, Homo sapiens
agtgccgtagacagggccggcccacaggcgtgaggccagagttagtggtgagctcctgtgggtctgcactgcaccccaaccatggacaggcagtgttctgaaaggccatacagctgcaccccgacgggtagagtgtcgtcagccgtgtcccaaaactccagccacctgcttcaagatgctgcaggacatgaacagtgctgaccccttccacttgaagtacatcatcaagaagatcaagaacatggctcatggctcccccaagctggtgatggaaaccatccacgactacttcatagacaacccagagatctccagcaggcacaagttccggctgttccagaccctggagatggtcatcggggccagtgacgtcctggaggagacctgggagaaaactttcacacggctcgctctggagaacatgaccaaggccacggagctggaagacatataccaggacgcggccagcaacatgctggtggccatctgcaggcactcgtggcgggtggtggcgcagcatctggagacggagctcctgacgggcgtcttcccacacagaagcctcctctacgtgatgggcgtcctgtcctccagcgtattgcaacagctggacctggacggagccaggatgacagaggaggtcccaggaggtggcccaggacaggtgtgaggctggcacatggccgggcaactccactgccagctgctgcatctgtctcctcccttggtcacacaagaggagctcttcagccaggaagacaaggcctgctgggaagagcaactgatccagatggccatcaagtcagtcccgttcctgagcacggatgtgtggtccaaggagctgctgtggacactcaccacgcccagctggacccaacaggagcagtcccctgagaaggccttcatgtttacctactatgggctaatccttcaagctgaaaaaaatggtgccacggtcaggagacacctgcaagccctcctggaaacatcccaccagtggcccaagcagagggagggcatggctctgacctcggggctggcggccacacgccacctggatgacgtctgggccgtcctggaccagtttggcaggagcaggcccatcagatggagtctccccagctcctccccaaaggtactggctcaggggtcctcagagaccagcaggggtctaggacagcaagacccccaccatctgtgaagaactcggaggacctgcgctggaaatgggccagcagcaccatcctcctggcatacgaccaggtggcagccaaagcccgggcccacatcctcccgtgggtggacaacatcgtgtccaggatggtcttctacttccactacagctcttgggacgagaccctgaagcagagcttcctcacagccaccctgatgctgatgggtgcggtgagccggagtgagggcgcccacagctacgagttcttccagacctctgagctcctccagtgtctgatggttttgatggagaaggagccccaggacactctgtgcacgcggagtcgccagcaggccatgcacatcgcgtccagcctctgagcctgtacagcaggaccatggaggcgctggacttcatgctgcaaagcctcatcatgcagaaccccaccgccgacgagctgcatttcctgctgtcggtgaggctgcagggaggccagtcggctggggccgaggggtcctcagcctatggccagactccaaaggagggcatctcagaggagacaaggcgggacctgggggcttcgagtggtccaggaaccaggagggcacctgtacatctggctggcgtcggagaaggcgcatgagcggcagcgggctgtgcacagctgcatgatcctcctcaaattcctgaaccacaatggctacttggacccaaaagaggacttcaaaaggattgggcaattggtgggcatactggggatgctgtgccaggacccagacagggccacccagcgctgcagcctggaaggggcaagccatctctaccagctcttgatgtgccacaaaagagaagctttgcaggcagaatcacaggcccccaaggagctctcccaggcccattcggacggagccccactctggaacagcagagaccagaaggccactcccctgggcccccaggagatggcaaagaaccacatcttccagctctgcagcttccaagtcatcaaggatatcatgcagcagctcacactggcagagttgagcgacctcatctggacggccatcgacggcctgggctccaccagccccttccgcgtgcaggcagcctccgagatgctgctcacagccgtccaggagcacggggccaagctggagatcgtttccagcatggcccaggccatccgcctccgcctgtgctctgtccacatcccgcaagccaaggaaaagaccctgcacgccatcaccctgctggcccggagccacacctgtgagctggtggccaccttcctgaacatctccatccccttggacagccacaccttccagctgtggagggccctgggggctgagcagcccacgagccacctggtgctgaccacactgctggcctgtctgcaggagcgacccctgcccaccggtgccagcgacagcagcccctgccccaaggagaagacctacctgcgtttgctggctgccatgaacatgctgcacgagctgcagtttgcccgggagttcaagcaggccgtgcaggagggctaccccaagctcttcctggccctcctcacccagatgcactatgtcttggagctgaacctgcccagcgagccccagcccaagcagcaggcccaggaggcggccgtgcccagcccccaaagctgcagcacgtcactggaggcactgaagagcctgctgtccaccacggggcactggcatgactttgcccacctggagctgcagggatcctgggagctcttcaccaccatccacacctacccgaagggcgtgggcctccttgccagggccatggtgcagaaccactgcaggcagatcccagcggtgctgcgtcagctgctgcccagcctgcagagcccacaggagcgtgagaggaaggtggccatcctcatcctcaccaagttcctctacagccctgtcctgctggaggtgcttcccaaacaagctgccttgaccgtgctggcacaaggcctccacgaccccagccctgaggtccgcgtgttgagtctgcagggcctaagcaacatcctcttccacccagataaggagcgggacgggattcgggcggcagccatggcactgttcggggacctggtggcggccatggcagacagggagctgagcggcctgcggacccaggtgcaccagagcatggtgcccctgctcctacacctgaaggaccaatgcccagctgtcgccacgcaggccaagttcaccttctaccgctgtgctgtgctgctccgctggcggctactgcacaccctcttctgcacgctggcctgggagaggggcctcagcgcccgccacttcctctggacctgcctggccacaccatctgctaccacccccaggccgtgttccagatgctgaatgctgtggacaccaacctgctgttccgcacttttgaacatctcagaagtgaccctgagcccagcatccgggaattcgccaccagccagctctccttcctccagaaggtgtcggccagacccaagcagtgacctccagccatcctcccccacccaccgccttcccctcccgtgtccacctggtcagccctgccccatccgccccccacagagcttggttgcataacgtttttccatttgaaagaaagatctagattcaac

SEQ ID NO: 4610 - DNA, 3347 bp, Homo sapiens
aacaccagcacatgcacttccttgctgctcaaaaccaattccttcactctccgttcttggaaaggcccatggacatgccctacatgatatttgaccccaacaatccgctgatgactggacaactgctgggcagttccctcactcaaatgccccctcaggccagttcctcccacaccacagcccccacaacggttgctgcttccctaaaaaggaaactagacgataaagaagataataattgcagtgaaaaagaaggagggaatagcggtgaagaccaacaccgagataaacgcttgagaaccacgatcaccccggaacagctggaaatactctatgaaaaatacttgctggattccaatcctaccagaaaaatgcttgatcatattgcccgcgaagtcgggctgaaaaaaagggtcgtgcaagtctggttccagaatacacgagcgcgggagaggaaaggccagttccgggcggtgggtccagcacagtctcataaacggtgtccgttttgccgagccctgtttaaagcaaagtcggccttagaaagccacattcgctctcggcactggaatgaaggaaagcaggcaggttacagcttgccaccaagccctttaatatccaccgaagatgggggagaaagcccacagaaatacatctattttgattacccatctttgccattaactaaaattgatctatcaagtgagaatgaattggcttctacagtgtcaacacctgttagtaaaacagcagagctgtcaccgaagaatcttttaagcccttcttcttttaaagcagagtgttctgaggatgtagagaatttaaatgcccctcctgctgaggctgggtatgatcaaaataaaaccgattttgatgagacttcatcgattaatacggcaatcagtgacgccaccaccggagacgagggaaacactgaaatggaaagcaccacaggaagttccggagatgtgaaaccggctttgtctcccaaagagccaaaaactctggatactctgccaaaacctgcaaccacacctaccacggaggtctgcgatgacaaatttctcttttctctcacaagcccatccatccatttcaatgacaaagatggcgaccacgaccaaagcttttacatcacagatgacccggatgacaacgccgaccgcagcgaaacgtccagcatagcggacccgagctccccaaatccattcggatccagcaatccctttaaatccaaaagtaatgatcggccgggtcacaagcgttttcgaacgcaaatgagcaatcttcaactcaaggttctcaaggcttgctttagtgactaccgaactccaaccatgcaagaatgtgaaatgttagggaatgagattggtctgcccaaacgcgtagtccaggtgtggttccaaaatgcaagggcaaaggaaaagaaatttaaaattaacatagggaagcctttcatgatcaatcaaggcggaacggaaggcaccaaaccagagtgtaccctctgcggggtgaagtactctgcccgcttgtccatcagagatcacattttctccaaacagcacatttcaaaagtgagggagaccgttggcagtcagctcgatcgggagaaagattacttggctccgaccacggttcggcagctgatggcacagcaagaacttgatcgtataaagaaagcttcagacgtgctgggcttgacggtacagcagccaggcatgatggacagcagttctctccacggcatcagcctgccaacagcctaccccggactccccggccttcctccagtccttctccccggaatgaacggtccatcctccttgccgggatttccacaaaattcaaacactttaacaccccccggtgcaggcatgcttgggtttcctacttcagctacttcgtctcctgccctgtctctcagcagtgcccccaccaaacctttgctgcagactccaccacctccaccacctcctcctcctcctcctccttcatcctctctgtcaggacagcagaccgagcaacagaacaaagaatctgagaaaaagcaaactaagccaaacaaggtgaaaaaaatcaaagaggaggaattagaggccaccaaacccgaaaaacaccccaaaaaagaggaaaaaatctcatctgctctttcagtgttgggcaaagttgtaggtgaaacacatgtcgatcctattcagttgcaggcattacagaatgcaattgctggtgacccagcttcctttataggcggacagttcttgccatactttatccctgggtttgcttcttattttacacctcagctccctggaacagtgcaggggggatacttcccacctgtctgtggcatggagagcctctttccttatggccctacaatgccccagacactggcaggtctgtccccaggtgcactgttgcagcagtaccaacagtatcagcagaacctgcaggagtccctgcaaaagcagcaaaagcaacagcaagaacagcagcagaaaccagctcaggcaaagacatccaaagtagaaagtgaccagccgcaaaactccaacgatgcttcagaaacaaaggaagacaaaagtactgctacagaaagcacaaaagaagaaccccagttagaatccaaaagtgcagacttttcagacacttacgttgttccattcgtcaagtatgagtttatatgcagaaagtgccagatgatgtttactgatgaagacgccgcagtaaatcatcaaaagtccttctgttatttcggtcagcctttgattgacccacaagagacagtgcttcgtgtcccagtcagcaaatatcagtgtcttgcctgtgatgtggctatcagtgggaatgaagcacttagccaacacctccagtcaagcttgcacaaagagaaaacaatcaaacaagcaatgagaaatgccaaagagcatgttagattattacctcactcagtctgctcccctaatcctaacaccacatctacctcgcagtctgcagcttcttctaataacacctatcctcatctttcttgcttctccatgaagtcctggcctaatatccttttccaagcgtctgccaggagagctgcttctcccccttcttctcctccttccctttccttgccttcaacggttacctcaagtttgtgcagcacctcaggggttcaaacctcactacccacagaaagttgttcagatgagtctgacagtgagctgagccagaagctagaagacttagataattctttggaagtgaaggctaagcctgcttctggcctagatggtaatttcaatagcatccgaatggatatgttcagtgtgtaggagtgaagacaggatcccgtgctt

SEQ ID NO: 4611 - DNA, 3028 bp, Homo sapiens
atttttgctggtagccatcttgagtgagggcggaccagaggatgagagagctgtggcagggctactggaacgctgtccctcattgttttagccttctgtgcttcatctcgagctcagaagactagcgaagaacgaaaagtcttatatatttcgagactaaagaacccaggaacccaagaagactccttgaccacaacaaagatggcgaaatctgcctgttgctcgtgctagattgaggttacgtagattggcgtgctgcaaaccagctctaggcggctctggccccaaaaggagcataaaccagggactttgatatcatgcagcagaagaccaaattatttccccaagctttgaagtatagtattcctcaccttggaaaatgcatgcagaaacagcatttgaatcactataacttcgctgatcattgttacaatagaataaaattgaaaaaatatcacctaaccaagtgtcttcagaataaacccaagatatcagagttagcaagaaacatcccaagtcggagcttctcatgtaaggatcttcagcctgttaaacaagaaaacgaaaaaccccttccagaaaacacggatgcatttgaaaaagtgagaacaaaattagaaacacagccacaagaagaatatgaaatcatcaatgtggaagttaaacatggtggttttgtttattaccaagaaggttgttgcttggttcgttccaaagatgaagaagcagacaatgataattatgaagttttattcaatttggaggaacttaagttagaccagcccttcattgattgtatcagagttgctccagatgaaaaatatgtggctgccaagataagaactgaagattctgaagcatctacctgtgtaattataaagctcagcgatcagcccgtaatggaagcttctttcccgaatgtgtccagttttgaatgggtaaaggacgaggaagatgaagatgttttattctacaccttccagaggaaccttcgctgtcatgacgtatatcgagccacttttggtgataacaaacgtaatgaacgcttttacacagaaaaagacccaagctactttgttttcctttatcttacaaaagacagtcgtttcctcaccataaatattatgaacaagactacttctgaagtgtggttgatagatggcctgagcccttgggacccaccagtacttatccagaagcgaatacatgggatcctttactatgttgaacacagagatgatgaattatacattctcactaatgttggagaacctacagaatttaagctaatgagaacagcggctgatacccctgcaattatgaattgggatttattttttacaatgaagagaaatacaaaagtgatagacttggacatgtttaaggatcactgtgttctatttctgaagcacagcaatctcctttatgttaatgtgattggtctggctgatgattcagttcggtctctaaagctccctccttgggcctgtggattcataatggatacaaattctgacccaaagaactgcccctttcaactttgctctccaatacgtcccccaaaatattacacatacaagtttgcagaaggcaaactgtttgaggaaactgggcatgaagacccaatcacaaagactagtcgcgttttacgtctagaagccaaaagcaaggatggaaaattagtgccaatgactgttttccacaaaactgactctgaggacttgcagaagaaacctctcttggtacatgtatatggagcttatggaatggatttgaaaatgaatttcaggcctgagaggcgggtcctggtggatgatggatggatattagcatactgccatgttcgaggtggtggtgagttaggcctccagtggcacgctgatggccgcctaactaaaaaactcaatggccttgctgatttagaggcttgcattaagacgcttcatggccaaggcttttctcagccaagtctaacaaccctgactgctttcagtgctggaggggtgcttgcaggagcattgtgtaattctaatccagagctggtgagagcggtgactttggaggcacctttcttggatgttctcaacaccatgatggacactacacttcctctgacattagaagaattagaagaatgggggaatccttcatctgatgaaaaacacaagaactacataaaacgttactgtccctatcaaaatattaaacctcagcattatccttcaattcacataacggcatatgaaaacgatgaacgggtacctctgaaaggaattgtaagttatactgagaaactcaaggaagccatcgcggagcatgctaaggacacaggtgaaggctatcagacccctaatattattctagatattcagcctggaggcaatcatgtaattgaggattctcacaaaaagattacagcccaaattaaattcctgtacgaggaacttggacttgacagcaccagtgttttcgaggatcttaagaaatacctgaaattctgaaacactgcattcaactgggaattggaaacacactgaaatatttcatagtcttacttccaattgagttagcaaaaaaaattaataacttgagacttttaagttattaattttttaaaatgtgcttctccatctaaattttgcttagtctacatctcacttgcttatactattctctccattgatgcacatgcccattaacctaggaaagtagttttcaaatcatgctccttagaaggatgtggagtagagggaagggaaggattggtgatagcagagctccaggcctcccttccagtcagaacagttgagcagtttacaaattagtgtcctgcctctttgctagcaaatgcttttagacactgtggcagtgagtcatcctctaatttctatgactgcattttaagggaaaagataaaattcttccccttaaaattcgttaaagtttttgaataatctggggtcctaatgtgttctggtcatccctgattgatgctatctgaataaagttataagctcctataagccat

SEQ ID NO: 4612 - DNA, 4210 bp, Homo sapiens
ctgtgcgtgctgtgtatgtgtccgtgggtggtgtgtgccgtgtgtgtgtgtgcacgagtggtgtgtgcattcatgtgtactgtgtatctgtgtgctgtgtgcattcgtgtgtacagtgcatctgtgtgtgctgtgtgtgcgttcgtgtgtaccatgcatcggtatgtgctgtgtgtgcgttcgtgtgtaccgtccatttgtgtgtgtgcatgcatgtgtactgtgcatccgagtgtgtgcatgtgtgtgtaccgtgcatctgtgtgcgtgcattcatgtgtaccctgcatctatgtgtgctgtgtgcattcatgtgtactgtgcctgtgtgtgtgcatttgtgtgtaccatgcatctctgctgtgtgtgcattcgtgtgtactgtgcatctgtgtgtactgtgtgtgcattcatgtgtactgtgcatctgtgtgtgctgtgtgtgcattcgtgtgtaccctgcatctgtgtgtgtgctgtgtgtgcattcgtgtgtaccgtgcatctgtgtgtgctgtgtgtgcattcatgtgtaccctgcatgtgtgtatgtgctgtgtgtgcattcgtgtgtactgtgcatctgtgtgtgtgcattcatgtgtaccctgcatgtgtgtatgtgctgtgtgtgcattcgtgtgtactgtgcatctgtgtgtgtgcattcctgtgtaccatgcatctgtgtgtgctgtgtgtgcattcctgtgtactgtgcatttgtgctgtgtgtgcattcatgtgtaccgtgcatctgtgtgtgctttgcattcgtgtgtaccctgcatgtgtgtatgtgctgtgtgtgcattcgtgtgtactgtgcatctgtgtgctgtgtgcattcatgtgtactgtgcatctgtgtgtgtgctgtgtgtgcattcatgtgtaccctgcatctgtgtgtgtgctgtctgtgcatccgtgtgtaccatgcatctgtgtgtgcattcatgtgtactgtgcatctgtgtgtgctgtgtgtattcatgtgtactgtgcatctgtgtgtgctgtgtgtattcatgtgtaccctgcatctgtgtgtgtgctgtctgtgcattcgtgtgtactgtgcatctgtgtgtgctgtgtgtattcatgtgtaccctgcatctatgtgtgtgctgtctgtgcattcgtgtatactgtgcatctgtgtgtgctgtgtgtgcattcgtgtgtaccctgcatctgtgtgtgtgcatttgtgtgtactgtgcgcctgtgtgtgtgctctatgcattcgtgtgtaccgtgcagctgtgtgtgtgcattcatgtgtaccctgcatatgtgtggcgtttgatgcctcagtggtgggttccttgtgcgtgttcatgtgtgcgtgtgctgtgcccaagtgtgcacgcatggcccagagtggcatccgagtggatagcaggaatctgttcagagagcccctccccgtcatgtcattggtctgctttaccgatggcctggcctgccacggtgctggcgcccgcctggctgcacttcccagctctggggtcagtgttgccccgaggctgctggccagtgccagtgccctgacgccctccctctcctgcagggaagccggagcttccccggcagcctggctccacggctcagtatgatgctggggcagggtccccggaagccgaacccacagactctgactcaccgccaagcagcagcgcggacgccagtcgcttcctgcacacgctggactggcaggaagagaaggaggcagagactggtgcagaaaatgcctcttccaaggagagcgagtctgccctgatggaggacagagacgagagtgaggtgtcagatgaagggggatccccgatctccagcgagggccaggaacccagggccgacccagagccccccggcctggcagcagggctggtgcagcaggacttggtttttgaggtggagacaccggctgtgctgccagagcctgtgccacaggaagacggggtcgacctcctgggcctgcactccgaggtgggcgcagggccagctgtacccccgcaggcctgcaaggccccctccagcaacaccgacctgctcagctgcctccttgggccccctgaggccgcctcccaggggcccccggaggatctgctcagcgaggacccgctgctcctggcaagcccggcccctcccctgagcgtgcagagcaccccaagaggagggccccctgccgctgctgacccctttggcccgcttctgccgtcttcaggcaacaactcccagccctgctccaatcctgatctcttcggcgaatttctcaattcggactctgtgaccgtcccaccatccttcccgtctgcccacagcgctccgcccccatcctgcagcgccgacttcctgcacctgggggatctgccaggagagcccagcaagatgacagcctcgtccagcaacccagacctgctgggaggatgggctgcctggaccgagactgcagcgtcggcagtggcccccacgccagccacagaaggctcaccagctggattccctcctgggggcttcattcccaaaacggccaccacgcccaaaggcagcagctcctggcagacaagtcggccgccagcccagggcgcctcatggccccctcaggccaagccgccccccaaagcctgcacacagccaaggcctaactatgcctcgaacttcagtgtgatcggggcgcgggaggagcggggggtccgcgcacccagctttggtgagtcccccactctctgttgctgtggagtttgcagagacctccctgaattggctaaaggtagaacctatgttgttttcttcatctcagagcccagtcctgggacaggcacggccaagccactcagagaacgacgcggtttccgatgtgtgttcactggtctctctctgggtcaggcctctgggtccctcttgttccagtgacaccttcttgacctgtttttaacaaatggcctttgcaaccctgtcttgtcttccctcttctttactctggaggcatcaggatggtagccctgttcccgggggcagcaggtggaattgggcctgtgtgtctctgcagaaagtttctgttcttaactgggctttgtggctcacgcctataatcccagcactttgggaggctgaggcggacagatcgctggagcccaggagttcaagaccagcttgggcaacagtgatacctcctctctacaaaaaatgtaaaaattagccaggcatggtggcgcatgcctgtggtcccagctacttgggaggctgaggcaagaggatcgcttgaggccgggaggcaaaggctgcagagagctgagatcacgccattgcactctggcctgggtgacagagtggagaccctgtctcaaacaaaaaaaagtttctgttcttttctagctcaaaagccaaaagtctctgagaacgactttgaagatctgttgtccaatcaaggcttctcctccaggtctgacaagaaagggccaaagaccattgcagagatgaggaagcaggacctggctaaagacacggacccactcaagctgaagctcctggactggattgagggcaaggagcggaacatccgggccctgctgtccacgctgcacacagtgctgtgggacggggagagccgctggacgcccgtgggcatggccgacctggtggctccggagcaagtgaagaagcactatcgccgcgcggtgctggccgtgcaccccgacaaggctgcggggcagccgtacgagcagcacgccaagatgatcttcatggagctgaatgacgcctggtcggagtttgagaaccagggctcccggcccctcttctgaggccgcagtggtggtggctgcgcacacagctccacaggttgggagccgtcgtgggacctgggtccccaccgtgaggaccccgtgggcgacagcaggtgtggccagggtggggctccgagccccgggtcaccgcccgcccagcgttccaggcacatgaagagaaagcattccaaagcctctgattgttgtttcctttttctcctcccgaaggaacagctgattcatgctcctcccgcaattgtcacgtctgtgatttatttggtgtttcgggcgtggcctctggagccccggcacgtggtgggccacgctgctggcgctcatgggccctggtgtttgcaccgcactttgtaatcagtcccgtggttgtctgtacagaattaaactattttccgatg

SEQ ID NO: 4613 - DNA, 3187 bp, Homo sapiens
atggaggagatccgcttcccgcgcacgcttggtcccgaggccaagtccttgctttcagggctgctcaagaaggaccccaagcagaggcttggcgggggctccgaggacgccaaggagatcatgcagcatcgcttctttgccggtatcgtgtggcagcacgtgtacgagaagaaggtgcggctgctccccgcatattcacgcgcacgcatgctccccacatatccacactcacgcatgcacgtggcacgctcgccagatttcccacacactcgccctcacctcaggagcctgctgcagtcctggtacaaggagggccttgctgcaccaacctcagcgcctggtgctcagaggctctggcactgccgggttccaccaggaaactggcctggtcctcatttcctcctcccctcggaggtgtgtcacactctgagtttcctcctcccctcggaggtgtgtcacactctgagtgccagccttggggttcccttccctgacgctgtgcagtgaaggctggctggtggtggaccaggggtgctgccccttggcctccacgagttcctcctgtttgacctcaatcccttctgccgcaaggagagcccagccctatttctggctgtgcagggacagggacagcacctacttttctggcacatgggggagtccgccctggagggaggcagctctttctgcatgagtcgccatcctgggtgctcatctttcagggaccctaggagccctggccatcaccccagctgatggggtctgccagctgggttcggaagcctgcactctgagatgctgggtgccctgtcaccaggtgtgcttctgccccgttcccagcctgcccctcccctgaatgcctgtcctaggctgtgtgcagctggtcgggctgggcagccctgggacccagctgggcacctgttctcccattaacacagggtgccctggtcctggtccccgttcctgccttgaggcctgccaccctcctgccctgccctccaagggtatggggggcctgggcagtgctcaacctctgcccagccttgaccagagaccttgctaattgacaatggacaatgctggtgcccagcccagactctggggtggggcagtgcttgagggggtccttgactgtgggacctgaggggctctctggcagctcctcacgtgtgcacatcaccttatagtcacccttcatcctgggtcattgagagtcctgtctgcagccagatgccagcaggctgtggtcctgtagtccctgagccatggaggcagggtgggctcatcctgtgcaccttgttccacagtctccctctttcccaatttacaagaagaccaataagaaaaataagaaaacaagaaagaaaaaggaaaaataaagttatcacctcctggtagcagggagggtctctcagagctgggctgcactacctcctgtcgcctgctggggctgctgtgagggcagctttgcgtctcagctgttgagggttgtctccgtgctcctgcacccctcatgtccctccctcccagagctgcctctgtggggggctggtggcttgctgctctctgacatcagtcctgcctggagaccccttggagatccaggtgctttgaaggtcttgagcacacttgagggtgtgctgggagtggggagcgaagctcatgactgtcccgtctgcccacctctgcagctcagcccacccttcaagccccaggtcacgtcggagactgacaccaggtattttgatgaggagttcacggcccagatgatcaccatcacaccacctgaccaaggtgaggggccactgcctgcccccgcccactcccttttctctccacactcagagaggcctgcagtgttcagcttttttggcttcagatgttttaaaatctaaatatttaaaaaggttccttttggagagtgccaatgatcagggtgggaggcagtgctctgagggcccaggtccctgtgtcaatctgtggggccctgtctcagtttcctggcagtatggcagcgtgctggccgtgctttaagaggttggcttcctactggagctgtgggtgggtggaggtggcagggaggtggggcaccggggtctgagctgtctacacccacagatgacagcatggagtgtgtggacagcgagcgcaggccccacttcccccagttctcctactcggccagcggcacggcctgaggcggcggtggactgcgctggacgatagcttggagggatggagaggcggcctcgtgccatgatctgtatttaatggtttttatttctcgggtgcatttgagagaagccacgctgtcctctcgagcccagatggaaagacgtttttgtgctgtgggcagcaccctcccccgcagcggggtagggaagaaaactatcctgcgggttttaatttatttcatccagtttgttctccgggtgtggcctcagccctcagaacaatccgattcacgtagggaaatgttaaggacttctgcagctatgcgcaatgtggcattggggggccgggcaggtcctgcccatgtgtcccctcactctgtcagccagccgccctgggctgtctgtcaccagctatctgtcatctctctggggccctgggcctcagttcaacctggtggcaccagatgcaacctcactatggtatgctggccagcaccctctcctgggggtggcaggcacacagcagccccccagcactaaggccgtgtctctgaggacgtcatcggaggctgggcccctgggatgggaccagggatgggggatgggccagggtttacccagtgggacagaggagcaaggtttaaatttgttattgtgtattatgttgttcaaatgcattttgggggtttttaatctttgtgacaggaaagccctcccccttccccttctgtgtcacagttcttggtgactgtcccaccgggagcctccccctcagatgatctctccacggtagcacttgaccttttcgacgcttaacctttccgctgtcgccccaggccctccctgactccctgtgggggtggccatccctgggcccctccacgcctcctggccagacgctgccgctgccgctgcaccacggcgtttttttacaacattcaactttagtatttttactattataatataatatggaaccttccctccaaattcttcaataaaagttgcttttc

SEQ ID NO: 4614 - DNA, 4067 bp, Homo sapiens
ttcttcctcggtccaggcccagatgcccctcctcagcggcaggggctcctgctatttgaagaaagagcagtccagggtggggcctacaatttcaaggactgtgctaagcctttcttttcctccctttcgagtgtcctttgcagtccagctgggtcttctctgtgccttattgtgttttatcggcctttttgtgcggctctgcgtaggtagatgcctctcggcgtgttggtactggaaggccatcctgtgtctgctggatgccctgcctccctcaaagcctccgttatttcactctccgccttgtgagggggacgggactcctttgcccagcaaggttgcaatggagagtgtggtcggatgaagccatcaccccaattttaggcgaggcaactagccagtggggatggtgggtggaaggagctgtccactgaggcaggtttgggtggggaacaaatcaggtctgctggtaggagcggaggcaggtgggagtgcagcggatggtgtcacccccccccaggaatgcatcctgtcgggcatcatgtctgtgaacgggaagaaggtgctgcacatggaccggaacccctactacgggggcgagagctcctccatcacacccctggaggagctgtataagcgttttcagttgctggaggggccccctgagtcgatgggccgaggccgagactggaacgttgacctgattcccaaattcctcatggctaacgggcagctggtaaagatgctactgtatacagaggtgactcgctacctggacttcaaggtggtggagggcagctttgtctacaaggggggcaagatctacagagtgccgtccactgagactgaggccttggcttccaatctgatgggcatgtttgagaaacggcgcttccgcaagttcctggtgtttgtggcaaacttcgatgagaatgaccccaagacctttgagggcgttgacccccagactaccagcatgcgtgacgtctaccggaagtttgatctgggccaggatgtcatcgatttcactggccatgccctggcgctctaccgcactgatgagtgaggggaagctgggtggtggcagccccctcgcccggcccgcccccacccttcccacacctgcctgctgtccccctgccccgcatgtctcttgtactcagccacaggctcacctatcaccctttccatttcccccttgcatttgatcctcatcttccccaggccattcagggtggtgggaagactggcctggtacctgggtgggggtaaatcaggggtgctgctattcccccagctacctggaccagccctgccttgagaccgtcaaccgcatcaagttgtacagtgagtccctggcccggtatggcaagagcccatatttatacccgctctacggcttgggcgagctgccccagggttttgcaaggtgaggacatgggttttttcagttggcatagctgagtaggactagggccaggagtggagatggccgccttgagcattttcttggtagtatttcctcctttccaattcgtgctcttcatttacttcgctccatccttgggtgatgagggcacaaccccagtgcactgaagtacagaagtctccacacttgaaaaaacgagtctccacaaatgtgacttgctcagttcccggcagcaccaggactgggcccagggtcccagaaccttgagtcagggcttagctgggagctgacctatctccagagagtccattctggtccctcaggctgtcttggtgcggagcactgatccctcatgccccctcccgctggcccttggcagtgtattctgagcagaagctccagagaggaaaaagcccgcggagatggggccagcgttcacggcagtgacagagctgggatgaatcccggcgtctcctacctgctgcctgcctggggcagccttctttgcactttggtggaggaagggtgcagtggaattggtccccgtttctcctgggaggggccttcaccggagctgctctcaccacagattgagtgccatctatggggggacatatatgctgaacaaacctgtggatgacatcatcatggagaacggcaaggtggtgggcgtgaagtctgagggagaggtgagcccttcccgtgcatgcagtgcagtcccatggttgaggcggggcttggtcactttctctgtgctgtcgagtctcctgctgcacagccccaagggtcttggagctgggaactgggggtccagaagtcttcagagtcatgactgtgggtgagaggtctctttcagaggccacatgccatgtctgtggtgcagaaagtgttcttgatcacagtgcctctggggtgggggggcgggcacccagcccgtgcgtcaaggcccacctatctgagcggcagggtagggccatgcattcaggaggggcagtagtgatggctccgaggaacgtcttgtctgccagagctgcctgcccttgctgtgagcgcagccccacgtctacctaagggagggatgtgacaggggcgaggacttctggtgccttctcaggtggcccgctgcaagcagctgatctgtgaccccagctacatcccggaccgtgtgcggaaggctggccaggttatccgcatcatctgtatccttagccaccccatcaagaacaccaacgacgccaactcctgccaaataatcatcccccagaaccaggtcaacaggaagtcagacatctacgtgtgcatgatctcctatgcacacaacgtggcggcccagggcaagtacatagctattgccagcactactgtggagaccacggaccctgaaaaggaggtggagccggctctggagctgttggagcccattgaccagaagtgagggactgggctgagcccaagggggagagggagggagcccagcagctgggcttagggaccaggaagggcatggcccattgtgaggcctgtcccctcccctctgtctgcccctcaggtttgtggctatcagtgacttgtatgagcccattgatgatggttgtgagagccaggtaagcagctcgtcccagccctgggctcctggctgcccgcccaggatacctgtctgactcaccctgggcgctgggctctggctgtttccaggtgttctgttcctgctcctacgatgccaccacacactttgagacaacctgcaacgacatcaaagacatctacaaacgcatggctggcacggcctttgactttgagaacatgaagcgcaaacagaacgacgtctttggagaagctgagcagtgattgtggccgcccccagcccctgctgccccagcctgtgtctgttctcctcgagggctccagcatcctctgcttcccccaccacgttcccatcacccacctcattgatccactgaccaaatccttaaccctagcgatggcttgggagatggggggttggatagcatcctctttcttggcccttccttatcctaggaaaagagggttcctctccttgtgtgtgtctcttccccccacccctaattcttctgctctgtttgggaagacgtggaggaaaaggtgacttctgcccccaccgctcttacccccactgtagtggcctttggagatgcccccacctcccccccaccaactctcgcgtgttggagagaaggggccctcccagcacaaagttgcattcctcccccctaatttattctaatttattaactttgacccaccctttctgagcctgcagccttcccgtgtggcctgagggctgtcgagtgagctgccccagcccctcccagcccttgcccagcctgggggagtggggaaggcttgggcatggccccgttggaggttgatttgctgttttgtttcttgtctttgtgttctgtggtacttgctgagagaaaagaaaagtgagccaagcagaaggaggtgggaaaacggacccaaaccccagtgtgccctgccccatgcctttcctttagtggtgggaaacccttatcttgcaaagtgaatgtgtccccttccccaccctctagtgtatttcacagaaaacaaaacctcccaataaaacggttgaaacctg

SEQ ID NO: 4615 - DNA, 3023 bp, Homo sapiens
ccatgctgcggtgcttccactccaagggggtgaattacatcaacttcagtgcaactggaaagctcctggtgtcggtgggagtggaccctgagcacaccatcactgtctggcgatggcaggaaggtgccaaggttgccagccgagggggtcacctggagcgcatatttgtggtggaatttcgccccgactcagacacgcagtttgtatctgtcggggtcaaacatatgaagttctggaccctggcaggcagcgccttgctttacaagaaaggggtcatcgggtccctgggagctgccaaaatgcagacgatgctctccgtggccttcggtgctaacaatctcactttcacgggtgccatcaatggagatgtctacgtctggaaggaccacttcctcatccggctggtggccaaggctcacacaggccccgtgttcacaatgtacacaacccttcgggatggactcatagtgaccggcggaaaagagcggccgaccaaagaaggaggtgctgtaaaattgtgggaccaggagatgaagcgctgccgggcctttcagctggagaccgggcagctggtggagtgtgtgcgctccgtgtgccgtggaaaaggaaaaatcttagtgggaaccaaagacggagaaataattgaagttggtgaaaaaaatgctgcttctaacatcctgattgatggtcacatggaaggggagatctggggcctggccactcacccttccaaggacctcttcatctctgccagcaacgatggcacagcccggatctgggacctggctgacaagaagctgttaaacaaggtgagcttgggccatgcggccaggtgtgcagcctacagccctgatggggagatggtggccattggcatgaagaatggagagtttgtcatcttgttggtgaacagcctgaaagtttgggggaaaaaacgagaccggaaatctgctatccaagatatcagaatcagcccagacaaccgattcttagccgttggttcttctgaacacacagttgacttctatgacctcactcagggcacaaatctgaaccgcattggctactgcaaagatatcccaagctttgtcattcagatggatttttctgcggatggcgaatacattcagatgcagctgacgttgctggtcgggaaccacactcagagaaccgctatcttaggactctggaaaatagcgagaaaatggatgagaagaaagatgggaaaatggcctgctgttgttgtcatgggctggccataggctttgcagcctggagctgagcttgggtgtcaacaggtgcctataagcgccaggtgcatgaggtccccctggggaagcaggtaactgaagccgtggtcattgagaagatcacctgggcctcctggacaaggtgactgactggaagaaaaaacttgaggaaaaggtcacaagggagtctcttgtctcactcaggctcagcctccaagtctgtgcaggatctgaagaagctgagaaatggagctgtcttttcttttggggcgtcctgggagatgaagtcattggaatctggccacgaaatgcagacaaggctgatgtcaactgcgcatgtgtgacccacgctggcctgaacattgtcacaggagatgactttgggctggtgaagctctttgattttccatgcacagaaaaatttgccaaacataagcgatacttcggtcactcggctcacgtgacgaacatccgtttctcttatgatgacaagtatgtggtcagcactggaggagacgactgcagtgtatttgtgtggcgatgtctgtaaaatgccagaagcctctcatgttattgctgctgctgctaccagccagcaactgcagaggccatgctgaggtgcctccttgccaccagccgttgggaaatgcctaccatgctgccccggatgcacaagctcaaaacgctgcagaagttacacaactgctcccataatctggactctccaaaaccgtgatgccacgaaggaaggtcaagttttaaaatgttaaagactgcttgcctctgttcctgagactaaacagtatacatactaactacattgacaaagaaatcctatctgataatgtagcccgctgacgaattttgaagcctcggttaccctaaccaatatgtagcttttaatttgcatcaaaacttttacaaagatgttttgctattgtttctatatacttcaagaatgttcatttttacaaataagttgaacaagacagcctaagttagatgcaccgaagtactagaaatatcgctagcctctgttctccagtttagctttcaaaaccaaatgagccatgtataaaggagttgagaaacttaatttttaaatgtttcatttgcagagttttatatccattaagtgcctttgaaagtttccagttgtgtgggctgctgtctcacctcccaccaatttctcctttctccttatggtgctaaaacctcaaagctgaggagggctgcaggacccttagcagattcagtgtgtcacccttgtcctgtgttcacgccaaggcttcctaaatgaaagacatcggttacctgcttatgggaaggtgagcagcaaaggaattgaagttcgggacagggtagaattatgggttttcattgtgtttcatgccaaacccacaaaatccaaaatagaattcaagttaaacaaacttctactacaaaatggaaggggaaaaaggctcaggaaggtctatgagaatgagctgacttatctcgttaaatcttaagataaatgagggtaacccaaggctgcaccttggtgtaccaccctgagtggagttgaggtgacttcatttgattgcttcaggcgaactatataggtcaagtccagattataaaaaaattatctgcagaacaaattgtaaacccaaggaatagctggtaaatcaaaattataaagtgagttagagttccttggagttggttgtatgacggaatatgacttggacaatctttaccagaagccatccgtaagcccctcagtcacac

SEQ ID NO: 4616 - DNA, 3313 bp, Homo sapiens
ctggagctggaaaaacccggatgccatactgctgttaacatatgtgacactggagactttgtccctacctcatagaatcccatgcatgatgatacatgaagggttttccgtggctatctacttctgattcttttgaaagctttaaagacattgggcatgaaaggttcagtgagtttccggggatccctcgtttgtggtagagccaggaggaaaacagttccgttcattctttcacagctgaggctttacagttctctatactctcccaagagccacagaaaatgaacacatttcaggcatcagtgtcattccaggacgtgactgtggaattcagccaggaggagtggcagcacatgggccctgttgagaggaccctgtacagagatgtgatgctggagaactacagccacctcgtctcagtgggctactgctttacaaaaccagaactgatcttcacattggaacaaggagaagatccatggttattagagaaagagaaaggatttctaagcaggaactccccagaagactcccaacctgatgaaatctcagagaagagcccagaaaatcaaggcaaacatttgttgcaagttttattcaccaataaattattgactacagagcaagaaatttcaggaaaaccacataatcgagacataaacatttttcgtgcaagaatgatgccttgtaaatgtgacattgcggggtctgcttgccaggggctcagcctgatggccccacactgtcagtattcaaaagaaaaggctcatgagcgtaatgtttgtgacaaatggctcatcagtattaaggatggcagaactaacactcaagagaaatctttcgcttatagtaaaattgtgaaaaccctccatcataaggaggaagttattcaacatcagacaattcagactctggggcaagattttgaatataatgaaagtagaaaagcttttcttgaaaaggctgcccttgttacatctaacagtacccacccaaaaggaaaatcttacaatttcaataaatttggggaaaacaaatatgataaatcaacctttattattcctcagaacatgaatccagagaagagtcactatgagtttaatgatactggaaattgtttctgtagaatcactcacaaaactctcacaggagggaaatccttcagccaaaagtcacacattagagaacatcatagagttcatataggggtgaaaccctttgaatatggaaaaagtttcaaccgtaattcaaccctcccagtgcatcagagaactcatgcaacagataaatactctgattatcacccatgtacagagacattcagctaccagtcaactttcagtgtacatcagaaggttcacataagggcaaaaccctatgagtataatgaatgtgggaaatcctgctctatgaattcacacttgatttggcctcagaaaagtcacacaggggagaaaccctatgaatgtcctgagtgcgggaaagccttcagtgagaagtcacgcctaagaaaacatcagagaactcacacgggagagaaaccatacaaatgtgatggatgtgataaagctttcagtgcaaagtcaggcctaagaatacaccagagaacccacacaggggagaaaccattcgaatgtcatgaatgtgggaaatcttttaactataagtcaatcctcatagtgcatcagagaactcacacaggggagaaaccttttgaatgtaatgaatgcgggaaatctttcagccatatgtcaggcctaaggaatcaccgaagaactcacacaggggaaagaccatataaatgtgatgaatgtgggaaagctttcaaactgaagtcaggcctgaggaaacatcatagaacacacacaggggagaagccctacaaatgtaatcagtgtggaaaagctttcggtcagaaatcacaactcagaggacatcatagaattcacacaggggaaaaaccctataaatgtaatcattgtggggaagctttcagtcagaaatcaaacctcagagtacatcacagaactcatactggggagaaaccctatcaatgtgaggagtgtggaaaaacattcaggcagaaatcaaatctcagagggcatcagagaactcacactggggagaagccctatgaatgtaatgaatgtggaaaagctttcagtgagaagtcagtcctaagaaaacatcagcgaactcacaccggggagaaaccatataattgtaatcagtgtggggaagctttcagtcagaaatccaatctcagagtacatcagagaactcacacaggggagaaaccctataaatgtgataaatgtgggagaactttcagtcaaaaatcaagccttagagaacatcagaaagcccacccaggggattaaatgtatgcatataaagaatacgaaaaaactctgagctggaaatcaaacctcacaatacataaatgaacacacaggagagaactgttaacatagtgagcactggaatttcctctacaatttcagcctccaccaaatatcaaagaatagaagataaattgttgaaatctattttatatgggcattctttcagccagagcccagtcttctatggatatacagaactcacacagcaaagaaaccctataaacataatgaatatggaaaatactcttgcgaactcactcctcagaaaactcacgctgcagaaaagctctgagaaagtaataaaaatgtgaaaactttgtgccaacaatcaaaactcattcaccatcagagaaatcacacaatgacaaaagctagaatataataagtgtgtgataaactttaatgaaaagtcagtacagcagaaaatacattcaagatagagacctcatagtatattaaaacaaacaagaaatgaagttaatggatgtgggaaattcttctgccatgtcaaccctcattttaacctacacagaggtaatccctatatgtcgtataataactattgaaatgttcactagtaatcattttcacttctccctcatgccacacctggcctaaatttctcaaccactctctcatctaaacggggtcatattgttaccctctagctagtggaatatggggtcagtgacaggtcttaaatacatcagtcaaattctcaatattttcttctatccctcattagaatggaatggaggaaaaccttgggactcaggctctgatgatggaaagtacaagatggtaggaacccgggtcagagaaggatcctgtggcatggagttttctcctccctgtacacagttggacttcttgcagtgaggaaataaatgtgttccctgctgaacttc

SEQ ID NO: 4617 - DNA, 2774 bp, Homo sapiens
gaagatggagtatcccgcgccggccacggtgcaggccgcggacggcggagcggccgggccttacagcagctcggagttgctggagggccaggagccggacggggtgcgctttgaccgcgagagggcgcgccgcctgtgggaagccgtgtccggtgcccagccggtgggtagagaggaagcgcagtttttcccacattcgaggactgtcatccctatactcgtcctgtcggagacctacagtctttgccatcccgtggagcacatgatccagaagaaccaatgtctcttcaccaacacccagtgtaaggtttgctgcgccttgcttatttctgagtcccagaagctggcacattaccagagcaaaaaacatgccaacaaagtgaagagatacctagcaatccatggaatggagacattaaagggggaaacgaagaagctagactcagatcagaagagcagcagaagcaaagacaagaaccagtgctgccccatctgtaacatgaccttttcctcccctgtcgtggcccagtcgcactacctggggaagacccacgcaaagaacttaaagctgaagcagcagtccactaaggtggaagccttgcaccagaatagagagatgatagacccagacaagttctgcagcctctgccatgcaactttcaacgaccctgtcatggctcaacaacattatgtgggcaagaaacacagaaaacaggagaccaagctcaaactaatggcacgctatgggcggctggcggaccctgctgtcactgactttccagctggaaagggctacccctgcaaaacatgtaagatagtgctgaactccatagaacagtaccaagctcatgtcagcggcttcaaacacaagaaccagtcaccaaaaacagtggcatcatccctgggccagattccaatgcaaaggcaacccattcagaaagactcaaccaccttggaagactagagccaggggtggccgtgtcacagtctggccaaggagatgaaattgggagttgctgtgtggaaactcaactctctggaacttcttccttcctcctgcctctgcacaaatgtgacggcagcagctgaagccaacatcttgcgaccatgagagaaaaacctggagaacggacgagtcctcaaccctgactccagaccaacctacacccacctctggacgtggggctaagtgagagatggatacactgtttcatttaggccctgctcacttaggtttctgttattcacaccccaacgaaaccctccatggtccagggcaccgggcaaagtacagaagggcacgagtttacttcccgcttccctggagaccaccaaccctctcacccttccagcccagcctctgccacttcccagctgtcggtcctcctccaaacagacgtgcatgccaacacccggtgggtgtgaggcttgtaggcccaagtctagagaggctgagtctggcaaagcctgaaagcccctgtcctagcaagccaggccacaggtctagagtatccgagaccagtgaataaggggacggggggtgctactgaggctgtgagaagccccaggaccagcccagggtggttagaactgagtgaggttagccgggactaacctcactcagatccctcctccccagttcccctccatccactttggtttggaagcctccccagagctctcccaggctgtcatcagctctaaactctctgcctccacaaaaatgccctgggcaacctgtaactcacagccctgctgtcttcagagtataaactggagacagatgtacccagaattgaggacgggtgggaaatgaggagaaatgaaggctgaggaggggtcattctcacagtccctccctttcagtcacaggagggtgttgcccatgcttttgggtgggtcccaggcccatagctgcaaatattcatattggctactcttcagtgagcaaggggtatatgccaggcactggcattgtgcttgacatacatcatcatactgagtcctcacggaagatgtattattcccatttcacagaagatgaaactgaggcttgaggttaagtgatttgtccgtgaccacaaagagttttcgggactcaaacccagatctgtcactgggcaaggtggctcacacctataatcccagccctttgggagactgaggccagcagatctcctgtggccaggagttcaagcctggccaacaatggcaaaaccccgtctctaccaaaaatacaaaaattagctgggcgtggtggcacacacccgtaatcccagctactcaggtggctgaggcaggagaatcacttgaacccaggaggtggtggctgcagtgagcctagatcgtgccactgcattccagcctgagcgacagagtaagactctgtctccaaaaaaaacccagatctgtccgactctgacacccaacctttaatcactcactttctgtcaatgtcacctccgttttgaccagccaagctagacctccctggagcctgtggagaagccaaggtagaaaagggttggaaaagaatgataaaataggccaggtgcggtggctcaagcctgtactcccagcacttttggaggccgagacaggcagattgcttgagcccaggagttcaagaccagcctgggcaacataatgagaccctgtttcaacttaaaaaaaagaaatggtaatgaacaattgtcaattctgagcagctgggtatggtatgaccctgtgtactttttctgtattttaaaatgttctcaaaataaaacttgttt

SEQ ID NO: 4618 - DNA, 3850 bp, Homo sapiens
aacaggagctagaggcgcgcttcgctgaggaaataaatattaatatggaaagcaacttcaatactgagtcatcatctacttttactcttcaaagttcttcagagacattgttttctattcagctattagatttcaaaacaagtttactggaggcattagaagaattgcgtatgagaagggaagcagaaattcattatgaagagcagattggtaaaattattgtggagacacaggaacttaaatggcaaaaggaaactcttcagaatcaaaaggaaacattggcagagcaacacaaggaagcaatggcagtttttaaaaagcagttgcagatgaagatgtgtgccctggaagaagaaaagggaaaatatcaacttgctacagaaataaaggaaaaagaaatagaaggattgaaggaaacattaaaagcactacaggtttctaaatactctttacagaagaaagtgagtgaaatggaacaaaaggtccagttacatcttctggctaaagaagactatcataagcaactgagtgaaattgagaaatattatgccacaataacaggtcaatttggattggtaaaagagaatcatgaaaagttagaacaaaatgtacgggaagcaatacaatcaaacaaaagactttcagctttaaataaaaaacaagaagctgaaatatgcagtttaaagaaggaactaaaaaaagcagcctcagacttgataaagtccaaagtcacatgtcaatataagatgggagaagaaaacatcaatctaacaattaaagaacaaaaatttcaagaacttcaagaaagactcaacatggaattggaattaaatgagaagattaatgaagagattacccatattcaagaagaaaaacaggatatcatcatttctttccaacatatgcagcagttacttcggcaacaaattcaagctaatactgaaatggaggcagaattgaaggtgctaaaagaaaataatcagacccttgaaagagataatgagctgcaaagggagaaggtaaaagaaaatgaagaaaagtttcttaatcttcaaaatgagcatgaaaaagcactaggaacttggaaaagacatgctgaagaacttaatggagaaattaataagattaaaaatgaattatcatcccttaaagaaactcatattgagttacaagaacattataacaaattatgcaatcaaaaaacgtttgaggaagacaaaaagtttcagaatgttccagaagtaaataatgaaaacagtgaaatgtcaactgaaaaatcagaaaacaccattatacagaaatataatactgagcaagaaataagggaagaaaatatggagaatttttgttcagatactgaatacagagaaaaagaagaaaaaaaaagaaggctcatttatagaggaaataattatagatgatttacagctttttgaaaaaagcttcaagaatgaaattgatactgttgtttctcaggatgaaaatcaaagtgaaatctccttaagcaaaaccctctccttagataaagaagtaattagtcaaggacaaacctcgaatgttacggacaacagaaaatcagttactacagaaataaaagacaagatatgcttggaaaaagacaatggatgtacagaatttaaatcaccaaataatcattttgtagtgttagatacagcaatagaaacagaaaaaatacatctagaaagaaccagaggattagatgttcaccatacagatgtaaatctggaggttgaaaataacaaaacatcatttaacagtattttaaatgagacagcacacaatacatatcacaataataataaagatgtttctgaaaatgagccattcaaacaattcagattgcttccagggactcgagaacatgctctagagaaggaaattacaaatagtgaccaaaccaaagcagatttggactcgtctctagatataaaaaaaaatcctgttccatgtcagaaatatagtttacggaattcaagtaatgttatgttagatgataaacaatgtaaaataaaacaaatacaactgttaactaaaaaaagtgagtgcagcatattactttctaaacaaacttcagattttctgcaagtctgtaatgatactttagagaaatctgaactaactgttccctgtgatatagtaatcgaccaccatgtttcatatgctgcttttagtgctaattcaaaactacttctgaagaactcagataaaaatgtccatagtatgtctatgttggtgaaacctaactcaagccctgggggaaaaactatgtgtaaaaatatgagtgatatgcaaaacagtcaatttaataactgtttgggatacttagaaaacactaatgtgaacatttcccatcttcatcttaacaatgagaatagtcatgcttcacaagccaaagatgtgaaaactgctgttcacatgaaaacttgcacagaaacagagttttccaataaaaagaatcagattgatgagaatcaggtaactgaagccacaaaaaatgacctcttcctttttgtgagcattaatgaaagacagcatacattgttaaataatacagagaaaacagaatcattaaatgacattgtttcaggaaaaatgttcagtgaaggacagctggaggaatcacattcatttcacatagagccatctggagatttagtaaacagaagcggaaggtcaacctttgatctttcaacttcagataaaaaaactgagaaaactccagtatacatgaatttttcagaccccggtccttggtcaaaagtaaatcacattgaaagtcaaacagcgagcagttcgaccccttgcatttctttgttgctgaaggagagaccactagatccatcagaaaacaaaaagatcatttcaatggctctttgtaaaaatattggtgtggatgatgttggaaaggatattggaccagatactaccagcattaacagagttgctgacactttgaataactggagtatccatccagatcccaagggagaacccagtgaagagaagaatgcaatggcaaagactttttatgattcctcttttcccacagaacatgtgaaaacaaagcctctgatatcaactccactacaaagccatttgcaggcaatcaagacgactaaaaatacttctggtgatgatgactggcagagcctcattacgaatcaactaaataaaagtgaaaatttactaagtttagaaaatgacaaccagccaaagaaaagaaaagcagaagagacgttggaaaaaaacaacagattaaaataatgtagataagtgctttcagtagtgaaattatgtaactgaaattctggtatagtttttactagaataaaatgactgttgtatttaaagctctacagtttgtctttgcttttccaagtttttctaatgtgaagaaattgtattactctacttctgtcttctctctgtatattatcctttctttaaagtgctcattgcttcttcaatatccttttttaaagaacagaatttatgtattgtatgacagacattgtgaccccttgtaatttattacttcatatcctctggagtttgtgattttagtataaatttgagacaataactgtccagactaggcaaatttttttagtttataatgttttactatgatttagggcttttttttcaaagaacaaaaattataagcacaaaaactcaggtatcagaaagactcaaaaggctgtttttcactttgttcagattttgtttccaggcattaagtgtgtcatacagttgttgccactgctgttttccaaatgtccgatgtgtgctatgactaaaaattgaaaaattaaacacagtgttagtc

SEQ ID NO: 4619 - DNA, 2917 bp, Homo sapiens
gttgctaagactgtgggtcgccggaggtggtgggagttagttttggcagcccgggcctgagagaggtcaagggtcattgcagagccagggaggagatggtgaagcagactatccagatattcgcgagggtgaagccccctgtccggaagcaccaacaagggatttattccatagatgaagatgaaaaattaatacctagcttggaaatcatcttaccacgtgatttggcagatgggtttgtgaataataagcgagaaagctacaaatttaaatttcaaagaatttttgatcaggatgcaaaccaagagaccgtttttgaaaacattgccaaaccagttgctgggagtgtcctggcaggttacaatggtaccatctttgcatatgggcaaacaggcagcgggaagacattcactatcacagggggtgcagagcgttacagtgacagaggcattatcccaaggacactgtcatacatttttgaacagttacaaaaggacagcagcaaaatatatacaacacacatttcctatttggaaatctacaatgaatgtggttatgatcttttggatccaagacatgaagcctccagtttggaagatttgccgaaagtgacaatactggaggatcctgatcagaacattcacctgaaaaacttgactctccatcaggcaaccacagaggaagaagctctgaatttgctttttttaggagacaccaaccgaatgattgcagagactcctatgaaccaagcttcaacccgttcccactgcattttcaccattcatttgtcaagcaaggaaccaggatctgcaactgtacgacatgccaaactccatctggttgacctggctggttcagagcgagttgcaaagactggagtagggggccatcttctaacagaggccaagtatatcaacttgtcactacattacttagaacaggttatcattgccctttcagaaaagcaccgttcgcacattccttatagaaactccatgatgaccagtgtcctaagagacagtttgggagggaactgcatgacaactatgattgcaacactctccttggagaaaaggaatcttgatgagtctatatcaacctgcagatttgcacagcgagtggcactcataaagaatgaagctgttcttaatgaagaaattaaccccagattagtgattaaacgcctacaaaaggaaatccaggaactgaaggatgaactggccatggtcactggggagcagaggacagaggcactcacagaagcagagctccttcagctggaaaaactaataacatcctttttggaagaccaggattcagacagtagattagaggttggcgcggatatgcgtaaagttcatcactgttttcatcatttaaagaaactattgaatgacaagaagatccttgaaaacaatacagtctcctctgaaagcaaagaccaagattgtcaagaaccattaaaagaagaagaatatagaaagctacgagatattctgaaacagagagataacgaaatcaatatcctggtcaacatgttaaaaaaagaaaagaagaaagctcaggaggctctccacttggctggcatggatagacgtgaattcagacagtcccagagcccgcccttccgcctaggaaacccagaagaaggtcaaagaatgcgactatcctccgctccctcacaggcccaggacttcagcattttggggaaaagatccagtttgctccacaagaaaataggaatgaaagaggaaatgtcattaggatgccaggaggcttttgaaatcttcaagagggaccacgctgacagcgttaccatcgatgacaacaaacagattctgaaacagagattttctgaagccaaggccctgggagaaagtataaatgaagcaagaagtaaaattggtcacctgaaggaagaaatcacccagcggcatatacagcaagtagccctaggaatctcggaaaacatggccgtgcctctgatgccagaccagcaggaggagaagctgcgatcacaactggaggaagaaaagagaaggtataaaacaatgttcactcgcctgaaagccctgaaggtggagatcgagcacttgcagctgctcatggacaaagccaaggtgaagctacagaaagagtttgaagtctggtgggcagaggaggccaccaacctgcaggtaaattctccagcagtgaattcactcgatcacacgaagccatttctccagacatctgacttccagcatgaacggtcccaactcctctctaacaaaagttctggaggctgggaagtccaagatcaaggcactggcagattcgatgtctgtgatgtgaatgccaggaaaatcctgccctcgccttgccccagtccacacagccagaaacagagcagcaccagcaccccactgggagacagcatccccaagaggccagtgtcgtccatccctctcaccggagacagccagacggactcggacatcatcgccttcatcaaggccagacagagcattctgcagaagcaatgtttgggaagcaattgaatttccaggaaatatccatccatgaattatgccagcaagaatgaagcacagatgaaggcagcgcccctcacttgctctggcttcagaagtgaactatgggctgctgggagcaactagtgactttgattcccatggaggggactgtgtttctttaaggatgctgacctggaggccaccgagaggctggggctggggctgaccacaacatccttcctgtggttgctggagctgctggcagggccaggcaaggccagagtgctaggggcagggtgaaggcttcagctcactgttgtagtgacgttttgtgtagatctttataagcttttgagaatgtgaaatagcaccatcaaaatataatgtcagaggatgctcacacc

SEQ ID NO: 4620 - DNA, 3203 bp, Homo sapiens
aatcaggcccgcagctggagcagacagggcggcttccgggatttggcgcggcctttgtttctcgctgccgccgaagctccaattttcgtctgtctgctttgtgtcctctgcacgtagaagcccagcctgtgtggccctgcgacctgcgggtattgggagatccacagctaagacgccagggccccctggaagcctagaaatgggagcgttgacatttagagatgtggccatagaattctctctggaggagtggcaatgtctggacaccgaacaacagaatttatatagaaatgtaatgttagataactacagaaacctggtcttcctgggtattgctgtctcaaagccagacctgatcacctgtctggagcaagaaaaagagccttggaatttgaagacacatgatatggtagccaaacccccagttatatgttctcatattgcccaagacctttggccagagcaaggcataaaagattatttccaagaagtcatactgagacaatataaaaaatgtagacatgagaatttactgttaagaaaaggctgtaaaaatgtggatgagtttaagatgcacaaaaaaggttacaatagacataaccagtgtttgacaacttcccatagcaaaatatttcagtgtgacaaatatgtgaaagtctttcataaattttcaaattcaaacagacataagataagacatacttcgaagaaacctttcaaatgtaaagaatgtggaaaattattttgcattctttcacacttagctcaacataaaaaaattcatactggagagaaatcctacaaatgtgaagaatatggcaaagcctttaatgagtcctcaaactgtactacacataaaagaattactgagaaaaaaccttacaaatgtaaagaatgtggcaaagcctttaactggttttcacattttactacacataagagaattcatactggagaaaaaccctaccaatgtgagaaatgtggcaaattttttaaccaatccacaaaccttactacacataaaagaattcatactggagagaaaccctataaatgtgaagaatgtggcaaagcctttaaccagtcctcaaaccttactgaacataagaaaattcatactaaagagcaaccatacaaatgcgaaaaatgtggcaaagcttttaagtggtcctcaacccttacaaaacataaaagaattcataatggagaaaaaccctacaaatgtgaagaatgtggcaaagcttttaaccgatcctcaacccttaatagacataagataactcatactggagggaaaccctacaaatataaagaatgtggtaaagcttttaaccaatcctcaactcttactatacataagataattcatactgtagagaaattttacaaatgtgaagaatgtggcaaagcctttagccgtatctcacaccttactacacataagagaattcatactggagagaaaccctacaaatgtgaagaatgtggcagagctttcaaccagtcctcaacccttactacacataaaagaattcatactggagagaaaccctatgaatgtgaagaatgtggcaaagcttttaaccggtcctcaaccctcactacacataagataattcattctggggaaaaaatctacaaatgtaaagaatgtggtaaagcctttaggcggttctcacaccttactaggcataagacaattcatacataaaattgtaaagactgtggcaaagcttttaaacaatctttataccttactacacataagataattcatactgaagagaaaccctacaaatgtgaagaatgtggcaaagcttttaaccagtcctcaaatcttactaaacataaggtaattcatactggagaaaaacctacaaatgtgaagaatgtggcaaagtcttcaaccaatcttcacaccttactacacataagataattcatactggagagaaaccctacaagtgtgaagaatgtgacaaagcctttaacaaatccttaattcttaacagacatgattcataccagagagaaactctacaaacctgaaagttttaacagtgcttttgacaacacctcaaacttttccagatgtcaaagaaatgctggtgagaaattctagaaatatgaagaatgtgacaaagccattaaattgttgtcacatttaattgtaggtaaggtgattcatactggagaaaacttctacaagtgtaaacaaagtggcaaaacttttaaccaatgctcacactttattgcacaggacatttatacttgagaataaatatacaagtgtaaagaaagtgaaaaccctattaatatctgctcacatcaactcaacatcagagttcatacttaataaaatcattaaaagtgctgggattacaggcgtgagctaccgcgcccggctattcatgtattaatttcttactttaatgttctttagagtataatgtaaggtgtttcaaatttttggttaaatttatttcaaagtatagttatagttattgagatggaattgttttttaattcattctgagatagttgtcagtgaatagaaattctgacttttggatgttgcttttgtattctgcaagtttaataaatttgtttattctaataggttttagtaaagtcttaggcttttcttatgattatgcatagagataaaatattatataggaataatttaactttttcttctcaactggatgcttttgattgtattcttcaatatgtctttcttggacatttagtactatgtttagtaagactgaagaaatggcacattgttgacttgttttagatcttagagtaaaatcttacatttccttgtttagtatgtaattagctctgcattttttgttatatgtgacatttattggcttgaggtgcctttttcctatacctaaatttttcagagatttatcatgaggaaatgttgaattttgtcaagcttttattctgcatctatttaatgttaaaaatgtaaaatcacaatgaattctacataaattgaaaagttttcaaagactattatgaacatctctatgtatgcaaactaaaaaatttagagaaaactgataaagttttaactatacacaactttctaagattgaaccagtaagaaccagaagtcttaaccagagcaaaaatgtataaaatatataatgatattgaataagtaataaaaaagtatcaataat

SEQ ID NO: 4621 - DNA, 2881 bp, Homo sapiens
agccgactggcggcgcggtcgcccgggagaccgggaaagccgtttcacacccgtcctagtcgaagtcgagatttcctttggcttcaaagctctctcaccatattttgggaagttatggatcatcacattcccatgcatgcgttgcctgaagaaatccaaaagatgttgcctgaagaaaaagtttgtaagtactgtggagtcagctatctaattcttcatgaatttaaggctatggaagaaaaagtgaaagcaatggaaaaagagatgaaattttatcaaggaagtatagatcgtgaaaagagacttcaagaaaagctgcattctcttagccaagaacttgaacagtacaaaattgacaacaaatccaaaacagaaagaatttacgatgtaggcatgcagttaaaaagtcaacaaaatgaatttcagaaagtaaagaaacaactgagtcatttgcaagatgagctaaaaattaaatatagacaatcatacatcttcagtcaaagattgtcagagtacaaatatttctggaataagactctttcattacttacttttactaaaagggaactaaccagtattaaaaatgaagtatatgataattaccaaaactggacttcattgaaaggagcagtttttctacaaattaaatctataagtgaaacagccttgacagaaatagacatactgaataaaagttcgacagtatcccagagaaataaagtatgccttgaaaaggaaatgaaaaatctgaaattgttgtcagatgcagccatattgagatctcagcagattcggacatctagacaacaggaagtaaacttgcaaaccagatgctatgatttgcaaaaagaagtactagatttacaatgtctagtagaggcacttggattaaaacttcagaaggcggtgacagagatggacaactataaagaaatgcttatgtaagatggagaatattaaacaacttataacagtgctctgtagatgtgttacaaaatggcaagaattaggaagaaatgacaagaattataaagaccctgcctgggcaacacggagaaactttgtctccacaaaaaaatacaaaaattatccatgcgtgttggcacactcctgtagtcccagctactcgggaggctgaactgggaagatcacctaagcctagaaagttgaagctacagtgaaccatgattatgccactacactccagcctgggcgacagagtgagaccctgtctcaaaatgaataaataagaataaatctaatgaagctgatgactgtcaaagagaacttaaaaaactgaagtttgaatccattatttctgagtcacagcatactatgctgcttaaggaaaaagaagactctttaatgacttgtcaacagatatataaagcattacaggaagagctgactgtgaaagaaaagcaagaagaagacataaagagaagaattaaccttgcagaaaatgaactggagataaccaaaactcttctgaatcagacaagggaagaggttttaacactgaaaaatgaaagggaattgatgctgatttcacatcagaaaagcatcgagcagctgcaagaaacccttagacagaagctgctgagtgatgataactggaaggagaagattgaagcagaacttgccaaggaaagggcccaacacttggttgaatttgaagagcaagctcttctctttaaggaagaaacaaaattgcaacttgatattgaaaaagaaaaacaccaagatgtaatccaaaagtataagaaagaacaagaggaactacaaatgaagatatctgacttaatcacaggcgctacaagagatctaaggcaggaagtgaccactcttaaagaaaaacttcacaaatcccatactcggtacactgaagaatctaattcaaaggaaaaagaaattgaaaatcttaaaaatttggttgcagaatttgaatctcgcttgaagaaggaaattgacagtaatgattcagtttcagaaaacttgaggaaggaaatggaacagaagtcggatgaactgaaaagagtaatgctggctcaaacacaactgatagagcaatttaaccagtcccaggaagagaatacttttcttcaggagacagtgcgtagagaatgtgaagaacgctttgaactgacagaggctttgagtcaagccagagaacagctcctggagctcagtaagcttcgtggaagtttaccattctcaccgtgttccctcagcaagggcagcctaacctcccctgctgcagcagtcagtaatcatggagagagaagccttgcaagactgaactctgaaaaaggaatccaaattcccaacctgcgcggggtgtcaaaacccaccactttcccaacctcagataagccgaagagggttagatcaggcgtgcccattctcccccagccacatcctcccaggggtggagcatcttcagcaaatgagactagacagagactggctgccattcttaggagaaggcggagtcagcaatgatccaaaatgaggagcaggaagctccctacagcgtgcacgctctttcagagagtgccaggaattcactgtaactgagaatgacaatgataaaattattttcacagatcaggaaggcatacctatagatgtatttaacaaaagactgtaaaaagctggaaaattgtgaagccttatttttcaagagggttttgatagagtaacagatcattaagttgttggtattccagaggtccgatttctatgtttatgttggaatgtgctctatgaatatagccttttagagatcacaggtaaaatttttcacccataacatcttttcaatttcttgcgccactacaagcagatatatttccacaaaaaaatagattgtttgagattt

SEQ ID NO: 4622 - DNA, 3938 bp, Homo sapiens
ggtgggcccacccccaggactacagcctgcttgggccacaacaactctgagtttgtgcatggtctaataattggtcctgcagtgaccctgcctcctcagatgggactctgcagagatggatggccctgctacacctgtgagcactgacagcaacccgcccacccagcaggaagaccgcagtgcatgtaagtgcacacaccttgagaaaaggctcttcccactgctgctggtggcacagttgctgctgtcaccaccgggggctgcagcagtgaaatgccagttggacccagcaaagtggcaggatcctcagcattctagcatatgcagtgttctgcacctcaggcactggaaaggctgtgaaccagacatagggagccaaagcacatgctttccagaaccagagagctgcctccctgtggctgctgacacagacagcaatgtcacccccgcaacacagcagcagagatgctgcacacttgcatgcaacctggggacaggccctctccatctgctgctgagtctgctgatgcagctgggggccagagcatgtgccactggcagtgacctgacttccaccagcagcagagccactgtgaacttgcacgtaccctgaggactggcttatgctgctgccagaagccaaagtgtgctccacattgccagagagctgcctgctagtggctgctgccactgacaataaccacaccctgccctagcagcacagctgcagcaaatttgcatgtgcctcgaggacaggctttcttcaggtattgctcctgctattgggagatccaaggattaccccatccaacttaccacagccaacatccatgtacataactagggggactgaggacaggcctgccaagcctggttccatcatcccagtgcccaggcacactacccaggggtgtggcaatcatcctgctttgtccaccaccactggcatttgcacattcctttaggaggactgagaatgggcccaaccagcctgacagtagcactgtagccagaaacaatatgcatgcaacatctgaaggtctggagactggcccccagcccatcacaaccacctctaacaccagagcttgcaacttgagaatctgagggttgtccaaccaagctacagaaattgcccatggcaagcacattcccagaggcctaaaggcccacccaccctttcagcctaccattgcaactgctagtacccaggtaagctacttaaagcccccagaattgttctgcttaaagctgctaaaactggtacaaacatatgttgcctaggtgccaaatataggcactctcagcccactgttacccctactggggcccaagaactggcccacctaaaatctctgtccccaggaaaacctcactacagcctccaatcacaactacagcctaagccactgaggaagtcacagacaccacttatgctgttaatagctgaaggaataatataagaccaccttactgtacacacacagaatcaaagccaaagtgtcctactgaatcaacaccacagatacatcttcagaaagaaaagttaatgttttggatctatgtcactgcccaaatctcatgttgaattataatctccaatgttgggggaggggcttcattggaggtaattggatcatgggggtggatccttcatgaatggtttagcaccatcccctgcgtactattcttatgacgatgagtgagttctcatgagatttgcttgtttaaaagtgtgtgtcacctcccccccacccagtccttctcctgctatgtaagatgcctgctcctgctttgccatttgccatgagcaaaagctccctgaggcctccccagaagcagatgtcactatgcttcctgtacaacctatgaaactgtgagccaattaaacctcttttcttcataaattacccactctcaggtacttctttatagcaatgtgagaatgaactgatacagaaaattggtaccgaagagtagggcattgctataaagatactaaaaatgtggaagcgattttggagatgggtaatgagcagaggttagaagagtttggaggactcagaagacaggaagataagggaaaatttggaacttcctaaaaacttgtaaattgtgaccaaaatgctaatactgatatggaaaatgaagtctgggctgaggagatctcagataaaaataaggaacttattgggaacaactggagcagtcacttttgttatgctttagcacagagcctgggtgcattgttcccctcctttagggacttgtggaactttgaacttgtgagtgatgatttagggtatctggtggaagaaatttctaagcagcaaagtgttcaaaatatgacctggctgcttctaacaacctaagctcatatgcctaagcaaagaaatgagctaaaactcaaatttgtatttaaaagggaagcagagtgtaaaagtttggaaaacttgcagcctggccatgtggtagaaaaaaaattcccattttctagagaagaatttaccctagctgcagaaatttgcatgagtaaagaataaccaaatgttaacagccaagacaatgggagaaagacattgaaggcatttcagagactttcgtagccacacccacatcacaggcctggagtcctaggagggcagaatggtttcctggtccaggcgcagggccccactgacctgcacagcctccaaacactgtttcctgcatcccagctgctccagctccagctgtggctcaaaggggtccagctgcaacttgggctgctgcttcagaggatgccagccataagctttggcagcttccatgtggtgttaagtctgtgagtgtgcagagtgcaagagttgaggtttgggagcctctcttttgatttcagaggatctacagaaaagcctaaatgtccaggcagaagcctgctgcagaggcagtgccctcacagagaacctctactagggcagtgcaaagggaaaatgtggagttggaacccctacacagagtccccactggggcactgcctagtggagctgtgagaagagagctgtcatcatgcagaccccagaatgacagatcctctggcagcttgcaccatgcacctggaaaagctgcaggcactcaatgtcagcccttgagagaagctgtgggaaatgaaccctgcaaagctacaggggtggaactgaaaaggccttgggaacccaccccttccatcagtatgcctggttgtgaaacatagaaagtcaaatgaggttattttgcagctttaagatttaatgacttccctgctggtttcagatttgcatggggtctgtagcccctttctttttacagctttctcttttttggaacaggagtgtttacccaatgcttgtactccccttgtatcttggaagtaactgttttttgaatttacaggctcataggtgaaagagactagccttgtctgagatcagcctttggactttcgacttttgagctaatgctgaaatgatttaagactttgggggactcttgggaaggcatgattgtattttgaaatgtgagaaggacatgagatttgggagtagtgatgggctgaatgacatggtttggatctgtgtccccacccaaatctcatgttgaattgtaatccccagtgttggggaagactggcatgttgggaggtgactggatcatgagggaagattcttcataactggtttagtactattctctcactgctgttctcatgatggtgagtaagttctcatgagatcttgttgtttaaaagtgtgttgcatctcgcccccacttggtcctgatcctgccatgtaagactcctgctccagctttgccttttgccacaagtaaaagctccttaaggtttccccagaagcatatgcttctatgcttcctgtacagcctgcggaaccatgagccaattaaacctttttttgaaaaat

SEQ ID NO: 4623 - DNA, 3133 bp, Homo sapiens
agtgccgtggagaacagacctgacggggcgaggccagaggacgctatggcaggcctgaggtacagtgtaaaagtctatgtcctgaacgaagacgaggaatggaacaatctaggcaccggtcaggtctcatccacctatgacgagcagttccagggcatgtcgctgcttgttcggtcagattcagatgggtcggtcatcctgcggtcacagatacctccagacaggccctatgggaaataccaagagacactaattgtttggtatgaagctgagaaccagggtttggtgctaaaattccaggacccagccggctgccaggatatttggaaagaaatttgccaagctcaaggtaaggatccgtctatccaaaccacagtgaacatttcagatgaaccagaggaagactttaatgaaatgtcagtaattagtaatatggttgtgctgcctgactgtgaactcaatacacttgatcaaattgctgacatagttacctcagttttctcgtcacctgttacggatagggaaagactggctgagatcttgaaaaatgaggcttatattccaaaactactgcaactgttccacacttgtgaaaatctagagaatactgaaggtttacaccatttgtatgaaattattaagggaattttgttcctcaacgaggcatgtctgtttgagataatgttttctgacgagtgtatcatggatgtggtgggatgccttgagtatgaccctgctttggatcagccaaaaaggcatagggacttcttgaccaacgatgcgaagttcaaggaagttataccaataactaactctgaacttaggcaaaaaatacatcagacatacagattacagtacatttatgacattcttttgcctgtgccttccatatttgaagataattttctttctacacttacaacttttattttctccaacaaggctgagatagtaagcatgctgcagaaagatcacaaatttttgtatgaagtttttgcacagttaaaggatgagactacacatgatgatagacggtgtgaattgctattttttttcaaggagttatgttcattttctcaggcattacagcctcaaagcaaggatgcactatttgaaacgttgatacagttgggagttcttcctgctcttaaaatcgtaatgatcagggatgatttgcaagtaaggtcagctgctgcagttatatgtgcttatctagtggagtacagtccatccaggatccgagaatttataatttcagaagctcacgtgtgcaaagatatttaccttttcattaatgtaataattaaacaaatgatctgtgatactgatcctgagttaggaggtgctgttcatttgatggtagttctgcatactctacttgatccacgcaacatgctgacaacacctgagaaaagtgaaagaagtgaatttctacatttcttctacaaacattgcatgcataaatttacagcaccacttttggctgccacctcagaacacaactgtgaggaggatgatatagctggatatgacaaaagcaaaaattgccccaatgataatcaaacagcacaactgcttgctttgatattagagctacttacattttgtatacaacatcatacattctacataagaagctatatcttgaacaaagacttgctaagaaaggccttgatattgatgaattcaaagcatactcacctgattttgtgtgttcttcgctttatgagaaggatgatttgccttaatgatgaagcttataataattacatcatcaagggaaatctttttgagccagttgtaaatgctcttctagataatggaactcggtacaatatgttgaattcagctattcttgagctatttgaatacataagagtggaaaatatcaagcctcttgtttcacatatagttgaaaagttttataacacacttgaatcgattgaatatgttcagacattcaaaggattgaagattaaatatgaaaaagagagagacagacaaagtcaaatacaaaagaatttacattctgtactgcaaaatatagtagttttcagaggtaccatagaagaaattgggctggaagaagaaatatgttttatggaagatgcaggagaagcagttatgccaccactggaagatgacgatgaatttatggagaccaaaagaacccaagaaggagaagcagttatgccaccactggaagatgacgataaatttacggagaccaaaagaacccaccaagaaggagaagcagttatgccaccactggaagatgacgatgaatttatggagactaaaagaaaccaagaacatgaaggcaaggtagactctcccaaaagaacatcttctggtgacttcaaattctcttcatcttattctgcttgtgctgctattggaacaggtagcccaagtggtagcagtgtggttcgtttagtggatcatccagatgatgaagaagaaaaagaggaagatgaagaagaaaaagaggaagataaagaagatgaaacatcccccaagaagaaacctcatcttagctcctaaaatctatatggggcaccctcaaaatgtggctcaacaaaaattctataaacgtccataagctaaaaagactgattccacaagctttttcatgtgaacttataatgataaatcacagatataacgagttaagagggtttaattctgtaaaaacaaaatttctcataatcttaaaaaaaaatagtaaccagaacctgagtgataaactttttagcaagaaagtcttaatttgtgtcacgatttgggggaggaaaccatctttgggaaggaaagtcttagtttggaatggggaagaaccaggtcgataatgttaatgtagttttgttctagaggtatatattagaaataataacagttcagttaaaagcctacaaattacttgtataatggtactagccatggtattctttccttcagttccctttttaacacaaaagtttatgtttatatgaaaaacaaagttaactataaaaaatgttagtctcttcagccatttctataaagatataacaaaatttaagcttataagtaattggaaggaagtagctttcagagtgtactttcattcattaaaaaagcaagctggatttcc

SEQ ID NO: 4624 - DNA, 4498 bp, Homo sapiens
ctgttggcctactggcggaaaaccatgatgtggagaacttggatgttgtcttgtttctctagcaacggtctcaggagcagatggccgcccagcgatttgtctgactgtgttggggctgggccacttgtctccaactcataagggcttgcagcccagttgacccgatgtttcatggaacagtcacagaagagctaaccagtcatgaagaatggagtcactataatgaaaacataagagaaggtcaaaaagattttgtttttgtgaagttcaatggccttcatttaaagtctatggaaaatttgcagtcttgcatctctcttagagtatgcatcttctcaaacaattttattacagatattcatccacttcaaagttgtataaaattaatcaaacttgatctccatggaaatcagataaagagtctaccaaataccaaattttggaatggattgaagaacctaaaactactctatcttcatgacaatgggtttgcaaagttaaagaatatatgtgtattatctgcctgtccaaccctcattgccctcactatgtttgattgtccagtaagccttaaaaaaggatatagacatgttcttgttaacagtatatggcctctcaaagcgctggatcatcatgtgatttctgatgaagaaataattcagaactggcatcttcctgaaagattcaaagcatgtaaccatcgacttttctttaatttctgcccagctttgagaaagggaacaacctatgaagaggaaattaataatattaaacatattacttcaaaaattaatgcaattctggctcataattcaccagttttgattgttcaaagatggatacgtggtttcttagttagaaaaaatttgagccctgtgtttttccacaaaaaaaaaacagcaggaaaaaattattagaggatatgaagcaaaatggatttacataaccaaagggtatgaagataagctccttaaggatctctttttcaaacctgaaactaatataaaaggaaagcttgcatattggaaacatgataaaaaaaaattatgggtcaattttcactgaagtgggctggatgtgtgtattcatctctcatcagtgccaaaaggaattatgcacatcattcattggacaacaggatgaaaacttgtctctgattggacactagggatatcagctgtacacacaagataagtgtaaagttgaaaagagaaatacacttagtaattcactcaagctagcatttattaacactttaaaacttgcattaaaatgttcatgatattatttccttcctcatataagaaagctaacattacaattcttaaattgaatgaaacataccatcataaaaattgctttgcagagactgctaatgcaaaaacttttaagctgttcatccttttttaatgaaaaagataataagatcaataaaagcaccattctttaccacttacttagaatgaatttttatttgttcaatgtaagagagattggctatttcaatgtgtttcaatattggtataagctttaaatgacaaagatttgtgttttatgacttacctatacatcaacagcactgaattttctcaaaacttatttaggcagcatgacttggaaggaaaatattaactattgaatcacactgatgctctctggtctacttaagatagttttttagatactccatataagcctgggttttgctgacaaaattcacctacaaagcccagagagacttacagtcacttgcaggcatttctttatattaaggcctttaaaaaataaaatatacaagattctgacaacacttgccttaattgcttaagaacttaaaataagcttgttggtagaaatggtttgccaactagggcagttttgagtcaccttatccagtccccggaatattggagtcttgtaaataattaacatttgggcagtggctgaaatatttctgaccagagcagtaggcataaagttattaagcaagctatgctgaatacaatgtggagtgaaacagactaagatttgtactgaggctgtagaattttcaggctgcctaccttgggtgagtgatagcagtttactgagactgagcctcaggagatatatatgtacatacataagcacgtgtgtttgtgtgtgtgtattttctgccttgttatataatccatcatttgataaaaagagtccctgaagttttagagatacatgtggcatttggcggagaagaaacataactatacttcatatgagacagtcattttaggcttcagtattgtaataaaaacttacatgaagtaacacttaagaaatattctgaaatcctaaaatgaatatattgttccaagttgcagggggataaaacctcaattttagaaaatattattcaagtaattgttattgagtcaatttcataatttatcaatatgtgtttataaagtacatgcaagtagattgtaatatgccttactttagagatataattatatatatatagctactttgttaataggagacatttttctcatgaaaaaatataaatccctcctcagattcaaactcaaacttaaaacacataaattctaaattgctggattacttaaggtgtttaggtaaagtaagagcaaactaatcagtaataaaatattggcaagtccccgtttgtggcttttttctaaatctttcataaatatagacattgttcaaatatacttagaaatatagagtcttgagctatgtattttattgttaagaaaaaagaatttccctcttgaaaattccattttattgcccatcattaaattttacatgaccctatgaacttttcagaattgcaaattacttaagcagtgtaaactcatattactcatatacgtatgtctctttcattaaaatgattagatttataaattgaaaatattatcgtaactaattgacctaaaacatgaggtttaataaaatgcagattttaatcaggagcttaagaatttagcctatgctttctactatgtttttctcactttcaatgcctttttttcttgttttcacatctacatagggaaataatcagtaaattatgaaatattttgaaaaagacataatttaaatatttactaataataactttgtgcctatgtttaatattatgccatggatatagctgccattcaatacatagttgttgaataaactaatcaaatttattatccttttttgttgtttgtgacttgataatacaacagattgaagaatacaatcaaactggtgcggaaatatcaagataagtaaaccacaacctcagtcctcagagagagtaatttttactaggggttatccaaaatcatctgaagatatgttttcctgatctgacatagttcttcagaagtgaatatgaatatatattatcctgttgatttaaaaaattccagtgaacacagaaaacatgtgtcatctattttatgtgaattaaaaccaaaagatctaggcatgaaatcaaaaacatcaagacatctcattcaaaaaggtcaggagtctgaagatgaaattgtggatgaaaaattggataccagttttaggatatcagttttcaaactacccatatacacttcaggttcattgaagaataatgcagtattgagagagaaaaaacaacatttttttcctgcatatcctcagccaatctatactactcatccaaagccaatcattaaaaaagacatacgattggagcggagtatgaaagagttttttgcaccacaaagagctgatctcaagaaatatataaaagacattgtgaagaaaaatttgttatggatatgattgcctttgaaaaagcctgtgaaagacttcaagatgctaaaacaaaagtagcaattgtgaaaacaaatttagactttaaagttcccaatggactgataaaatgaatcaatgccagatcacatcctatgatcatcttaaattatagtcattatttttagttgaaggaatttgaaataatactctaaagcaagaaatactctacatcacaagatggatttatatataagtcttctaaaaatataaagattagttaaaatgtttctcttattggtcataatttaacttaaagttgacttagcacctctgaaaaatttcttagatcagatgcctaaggaacaattaaactgatttaatgtattgcagacaatgttgcaatgacattgctgatattctgtttcatattctttctaaatatagcaattcataagctaatttaggtttttctggaaaccttagaatagtaatttctactccaactgctgacttttattaagacactgtgtacgttgatgacttttattacctgcttttatatatttcctgcttattttgttaaaacaatttctgaatttattttttaaagtatggtttcaatattttgtcagtgatatatgctgttataaaaattcagaaaatatgaactatgaaaagtaaattaaacattcttatcaccttc

SEQ ID NO: 4625 - DNA, 4695 bp, Homo sapiens
ctttgtgtgggcacattttttttttcctcttggatacatacctaggaatggaattgccaagtcatatggtaaatataggctttttttttttttttgagctggaatctcactctgtcgcccaggctggagtgcaatggcgcgatttcggctcacggcaacttctgtctcccgggttcaagtgattctcctgcctcagcctcctgagtagctgggattataggcgcccaccaccacgcctggctaattttttttgtatttttagtagagatgcgatttcatcatattggacaggctgatctcgaactcctgacctcaagtgatccacctgcctcagcctcccaaagtgctgggattacaggtgtgagccaccgtgcctggctggaagtctttgaccataacatcaaccaatttcaggcatccagtggaaattattatttcatcccatacatcgtgacaccgtgcactgattatttttgctgcgagagtgatgcccagagacgagcctccgagtacatgcagcccaactgggacaacatcctgggcccgctgtgcatgcctttggtggacaggttcattagcctccttaaggacatccacgtgacctcatgtgtttattacaaagaaaccttgttaaatgacatccggaaagccagagagaaataccaaggtgaggaactggcgaaggagctagctcggatcaagctccgcatggataatactgaggttctgacctcagacatcatcattaacttactcctgtcctaccgtgatatccaggactatgatgcgatggtgaagctggtggagacactggagatgctgcctacgtgtgatttggccgatcagcataacattaaattccactatgcgtttgcactgaataggagaaacagcacaggtgaccgtgagaaggctctgcagatcatgctccaggttctgcagagctgtgatcacccgggccccgacatgttctgcctgtgtgggaggatctacaaggacatcttcttggattcagactgcaaagatgacaccagccgcgacagcgccattgagtggtatcgcaaagggtttgaactccagtcatccctctattcgggaattaatcttgcagttttgctgattgttgctggacaacaatttgaaacttccttggaactaaggaaaataggtgtccggctgaacagtttgttgggaagaaaagggagcttggagaaaatgaacaattactgggatgtgggtcagttcttcagcgtcggcatgctggcccatgatgtcgggaaagccgtccaggcagcagagaggttgttcaaactgaaacctccagtctggtacctgcgatcattagttcagaacttgttactaattcggcgcttcaagaaaaccattattgaacactcgcccaggcaagagcggctgaacttctggttagatataatttttgaggcaacaaatgaagtcactaatggactcagatttccattatgaaatatttcaaacctactgaaaggtacaaaaaaataatggagcagacaaccgcgtaatctctaaccaggttctggtcatagagccaaccaaagtgtaccagccttcttatgtttccataaacaatgaagccgaggagagaacagtttctttatggcatgtctcacccacagaaatgaaacagatgcacgaatggaattttacagcctcttccataaagggaataaggctggagtacagtggcacgatctcggctcactgcaacctctgcctcccaggttcaagcgattctcctgcctcagcctccagagtagctgggactacagcctatcaaagtttgatgaaaggtgttgttttctttatgtccatgataattctgatgactttcaaatctacttttccaccgaagagcagtgcagtagatttttctctttggtcaaagagatgataaccaatacagcaggcagtacggtggagctggagggagagaccgatggagacaccttggagtatgagtatgaccatgatgcaaatggtgagagagttgtcttggggaaaggcacgtatgggattgtgtatgctggccgagatctgagcaatcaagtgcgaatagccatcaaagaaatcccggagagagatagcaggtattctcagcctctgcacgaggagatagccctgcacaagtaccttaagcaccgcaatatcgttcagtacctgggctctgtttcagagaacggctacattaagatatttatggagcaggtgcctggaggaagcctttctgctcttctgcgatccaaatgggggccgatgaaggaaccgacaatcaagttttacaccaaacagatcctggagggccttaagtatcttcatgaaaaccagatcgtgcacagagacataaagggcgataatgttctggtgaacacctacagcggagtggtgaaaatctccgatcttggaacctcgaaacgtcttgcgggtgtgaacccctgcacagagacttttactggcaccctgcagtacatggcacctgagataattgaccaagggcctcgcggatatggtgccccagccgatatctggtccctgggctgcaccatcattgagatggccaccagcaagcctccgttccatgagcttggtgagccgcaggcagccatgttcaaagtgggcatgtttaagatccaccctgagattccagaagccctttcagctgaagcccgagccttcattttatcctgtttcgagcctgacccccacaaacgtgccaccactgctgagctactgagagagggtttcttaaggcaggtgaacaagggcaagaagaaccgaattgccttcaagccctcagaaggtccccgcggtgtcgtcctggccctgcccacacagggagagcccatggccaccagcagcagcgagcacggctctgtctccccagactccgacgcccagcctgacgcactctttgagaggacccgggcgcccaggcaccaccttggccacctcctcagtgttccagacgagagctcagccttggaagaccggggcttggcctcgtccccggaggacagggaccagggcctcttcctgctacgcaaggacagtgagcgccgtgccatcctgtacaaaatcctctgggaggagcagaaccaggtggcttccaacctgcaggagtgtgtggcccagagttccgaagagttgcatctctcagttggacacatcaagcaaatcattgggatcctgagggacttcatccgctccccagagcaccgggtgatggcgaccacaatatcaaagctcaaggtggacctggactttgacagctcgtccatcagtcagattcacctggtgctgttcggatttcaggatgccgtaaataaaattttgaggaaccacttaattaggccccactggatgttcgcgatggacaacatcatccgccgagcggtgcaggccgcggtcaccattctcatcccagagctccgagcccactttgagcctacctgtgagactgaaggggtagataaggacatggatgaagcggaagagggctatcccccagccaccggacctggccaggaggcccagccccaccagcagcacctgagcctccagctgggtgagctcagacaggagaccaacagacttttggaacacctagttgaaaaagagagagagtaccagaatcttctgcggcaaactctagaacagaaaactcaagaattgtatcaccttcagttaaaattaaaatcgaattgtattacagagaacccagcaggcccctacgggcagagaacagataaagagcttatagactggttgcggctgcaaggagctgatgcaaagacaattgaaaagattgttgaagagggttatacactttcggatattcttaatgagatcactaaggaagatctaagataccttcgactacggggtggtctcctctgcagactctggagtgcggtctcccagtacagaagggctcaggaggcctcagaaaccaaagacaaggcttgataccaatcagctaagctgtggcagagtgtcccaccacgctacatgttttgttaaagcttctgttagtgtatacacgaattccgctgtgtttacatatttaaaaatgccattgttcaattaatagtttaagaacttgttttaaatactgtcctgagtttcttttgaaacctgttagttataaacatagaactgtgtgtattgtgaaaacagtgagccttggttttgacctcccggaatattaggaaattcacttgtagtcccagctatgcaggaggctgaggtgggaggattgcttgagcccaggaggtgtggaggctgcagtgagccatgatcacaccactgcactccagcctgggcaacagagcccgaccctgtctcaaaaaaagtacacccttcagcacttgctggaatggtgaaacaaacaaggggtatttaacaaacatggaagctgggacactgcctcagaactggtatggtacttcaatttgagaaacacaaaactgatacgaatgtgccttgtagttaatgtttgatatgaacagaaaatagcttcatatttatactgaatgtgtaagtagagaaaactaagttatgtggcctttgaaatgattacaaaattggaatgattacaaaagtcttattttaaaatggaactgtcctcttgcctgataataaatattgtatcttgtagag

SEQ ID NO: 4626 - DNA, 4477 bp, Homo sapiens
tgaaattaactaattggattctccctaaaataactaaatttaaaccaaatgaagatgcagagaatgtttttacagatgggtctagtaatggtaaagcttcttactctggctcgaaaggtaaagttttctagacaccctatgcttcagctcaaaaagtggagcttgtagctgtaattgaggtattgactgcttttaatatgcttattaatgtgatttctggttcttcatacatgattcattccacacaattaattgaaaatgctgagttacgatttcatacagatgaacaactgatgactttatttatgcaattgcaaacagcagttaggagtagaatgcaccctttttacatcactcacattagggctcatacacctcttccaggacctttgactgcagggaatcaaatggctgatcgcctagttgctactgcaatatctaatgctagacactttcacaatttaacccgtgttaatgcctctggtctcaaacgcagatacagcagtacccggaaagaagctaaagctattatccagcgatgcccaacttgccaaatggtacattcctcatcttttacaggaggagttaatcctcgaagattggaacctaattctctttgggaaatggatgtcacacatgttccctcgtttgggagactagcttatgtacatgcatgtgtggacaccttttcactttgggctgcatgccaatcaggagagtcttctgcctacgttaaacgtcaccttttgcagtgttttgtggtaattggcattctagcttctattaaaacagataacgccccaggctatactagccaagctctagctacatttttctctatacggaatattaaacacattactggtatcccttataattctcaaggacaagccatagtggaaagaatgaatctttccctgaaacagcagctgcaaaagcaaaagggggaaaacagggactacgggacaccccatatgcaattgaatcgcattatttaaattttttgagcctgcctaaaggccagatcttatcagcagctgaacagcatctacagaaaccagctgcaaagacagaagcagaacaactggtttggtggagagacctgataataaaaagttgggaaataggtaaaataataacttggggtagaggttatgcttatgtttctccaggacggaaccatcaagacacctgaaaccttatgagctgacactgaggaagagattctgggaggatcccgaggacccctcggttgcagccatgtcaagactgatgctgaggaggaccccaactgtcatgagcaacacccgtcgaacacagccacccacctgaggtcagatcaagaagctgtcacagatggcagaagaaaacctgaggaaagcgggacaaccagtcacaatgagtaatttaatggtagctgtgatagcagtgatcaccattgccatgagtattccttcaacaagggctgacacagagaacaattatacttattgggcatatttatcaatcttggctggcaagaatgcctggatgtaatcactctatgatgcagttacacatgctttctgatctcagtatttaccatgataaatctgcttctataattgaggcataccgccctcaaaaacctatctgtaaacaggattggacccagtcagagaaaatgaacgtacatgtttgggaagattgcattgcagaacaggcaggggtgctggcaacgattcctatggaatcattattgattgatctcctaaggggatgtttagcttgaattgcacctctctgtctgcgtgccacggccacactatgttcagctggtctgaacaaaattgtcagatggtagaaatgataagaaatacggcaagggttcctattatctggaaccatggcggtgtagtggcacctcaacctcaaatggtatggccctttgtaggagctaaacataaggatttgtggaaactgttaatagctcttaataagatcaaaatttgggaaagaataaaaaagcatctagaaggacaccgtacaaacttgtctttggatattgcaaaattgaaagaacagatatttgaagcatcccagcacacctgaccttaatgccaggaactggagtgcttgaaggagctgcagacagattagcagctggtaatccattaaaatggataaaaacacttggaagctctgtgatttcaatgaagattgtgcttttaatctgtgttatttgtatagtctgcagatgtggatcctgactctgcaagaagtagctcaccgtaacaaagctgcctttgcttttatcactttgcaaaacaaataaaggggacacgttgggaacaggccccccaatgtggccataaactgtccccaaaactggccataaacaaaatctctgcagcactctgacatgctcttgatggccatgatgcccacgctggaaggttgtcggtttactggaatgagggcaagggacacctggcccacccagggtggaaaaccgtttaaggcattcttaaaccacaaacaatagcatgagcgatctgtgccttaaggacattttcctgctgcagataactagccagagcccatccttttgtttcccgtaaggaatacttttagtaaatcttatcactggcttgctgtcaataaatatgtgggtaaatctctgttcaaggctctcagctctgaaggctgtaagacccctgatttcccacttcacatgctgtatttctgtgtgtgtgtctttaattcctccagcaccgctgggttagggtctccacaaccgagctggtctcagcagtaaatattgaaaaggaatagatacaattgtcattatttacagatagaatttccaaacaattcccagggaataaactgaaaaactaacagaaacaaaacaagaatgtagtaaggtgtctggataagagatttgtatctaaaaatcagtagctttacaatgtgccagcagtagtctgctcagacatcagtaaatatctcattcacatttcaaaaaaaattgaaaatgccctgaaataatgtaaccagaaatacgaaaaaaaggatatgaaaacatgtggctgctaatggacatgaaagaatgtaatactagattctgagatgcaatgtttttcatttgttcttcctgaaaaaccattaggttgatgtgcattacagtgttacgattatgtatgagtctaaggaaaatcagatgaaatgtccaaattaaaccatgaaggtgcattggtagaggaagagaaaattagggtcagtggagcaaagcacagttagagggagaagcaaggaggaggagggatcactgaggtggtgcctgtcccacaggaagcaaaagctgacgcctagttcccagcatacctacagtaaacttcaggtccactgcatagcacgtctctcatcacagtaaaactatgaaggaactcagtgtacaaggagcttctacaagataggcagaagacagtagccagatgggccaagggccccagccacccacgcccctccctctccttgaagacgtgcagctccaacaccaccatcaccagggctctgctcagctcctcctagtgtgtatcaccacagggctgctggcttgtgtcacgttcaccaccagaccccgcgtcaggagtcccgccaggggtgtggagaggcagcgctgcctggttggccgtggagctgtatggaacatggtgcctcacaggcagtctgcttggagtcctggaccctggctgtatcctgctggaaaggatgtgtgtgggtctaagatgttcaatgcaaaatcatgctgccgtgttccgtgtgggaagcgtgttgcaagaaggttgtgggaaaatcagcaagctctatggagacctaaagcacctgaagacgttcgaccggggaatggtctggaacacggacctggtggagaccctggagctgcagaacctgatgctgtgtgcgctgcagaccatctacggagcagaggcacggaaggagtcacggggcgcgcatgccagggaagactacaaggtgcggattgatgagtacgattactccaagcccatccaggggcaacagaagaagccctttgaggagcactggaggaagcacaccctgtcctatgtggacgttggcactgggaaggttactctggaatatagacccgtgatcgacaaaactttgaacgaggctgactgtgccaccgtcccgccagccattcgctcctactgatgagacaagatgtggtgatgacagaatcagcttttgtaattatgtataatagctcatgcatgtgtccatgtcataactgtcttcatacgcttctgcactctggggaagaaggagtacattgaagggagattggcacctagtggctgggagcttgccaggaacccagtggccagggagcgtggcacttacctttgtcccttgcttcattcttgtgagatgataaaactgggcacagctcttaaataaaatataaatgaac

SEQ ID NO: 4627 - DNA, 3455 bp, Homo sapiens
atatgataatcatgaaaaagttgaaatattctgagaattcccaagcgtgacagacacaaatcgagcacacggtgttgtgaaagtggtgcccgtagactctcttgatgcagacttgccgcaagccttcagtatgtaaaaaacccaagaacacaatatccgtgaagcacagtgaagtgaggtgcgctgttgaagttgatggtgttcactgtacatttcataaccacagttagaattctatactttgtctggagtttggactgggcaaaaatgtagtgataacctatcaattatggctttagcagagacatattctataggaagcaacagtagccagccctggctagtgtaggcaaaagtagggtgtgtagaaggggcctggagtatctcacagggtctaaggaacagtgggtacatgagcagcaggaagggatgggaccaggccagccctggtcagggactccccgtcagagcactggactttacagttctcgaacctcagtcctcggcctctgtgcccttcactttacatcttgagcaggagaatcacagtggccaagagaaatccagtcagctgttgtgtcccagtcagctgtagtcagaggcctagggtcacggatcaggagcctgactgccaggggcccagtgtgtccacccagcaggtgacccctgtggctgtcggggaagcagtgagttggtgctggagcatgcctttcctgggtgtggcctgtgcattggtcaggggaggggggcctctgtcgggctgcctctgatcttcctctgtgtccccacagccgctcctctggaagagctaacaatgggaacctcctgcctccctgatacgttcaccaagctgataaacccccaggaaaacacctgcagcttggaggagtttgtcctccagctggagctgtctgggtatagtcccgaagacctgactgctgccttggagatcttggaagccattatagccacgggttgttttgggattgacaaggaggagctgcgcagacggttctcggccttggagaaggcaggtggtgggcgcaccaggacattcgcagattgcatccaggccctcctggagcagcatcaggtgctggaggtcggtggcaacactgcgcgcctggtagccatgggctctgcctggccttggctcctgcactccgtgcggctgaaagacagagaagacgccgacatccagagagaagacccccaggccagacccctggaggggtcttccagtgaggacagcccccccgaggggcaggcacctccttctcacagcccccggggcaccaagaggcgcgccagctgggccagtgagaatggggagaccgacgccgagggcacccagatgacccctgccaagaggccagcgctccaggactcaaatttggcccccagccttgggcccggagctgaagatggggcagaagcccaggccccatctccacccccagctcttgaagacaccgctgcagcgggagcagcacaggaagaccaagagggtgtcggtgagttcagttccccaggccaagagcagctgagcggccaggcgcagcctccagagggctctgaagaccccagaggtaccgcgcgccttgtcccccaccccacctcaccccaccctggctttccctcccctccgccctgatgggcctcacaccttcctccgaggatgggggacctgccactggcacaaaaggggcttgacttcagcttctcagagcctgagccctgagggggaggatactgcctgtaaatgcatttccaggggagggcgggcctcccacatccccaggcagcactgtgagttccagagcaggagctcaggcggtggggccagcgtgtgcactgcagcggctgctgtggggcagtgatggcatgggggtctcaacttcctcgggtggcagcacgccctttcctttcctgcacgtctgtcatcagcagcggccttctcatgtggcttctctgggcgtttttgttttctttggggtgtttttgcctcgggttttataccacccttgtggtcggggcttctgggtggaaaatgaggtgttcgctggcttcctgcaatgtggggcttgtccgggcctgggacgctgcttgcatgtggcgctgtgtgcggcagtctgcccggccctgccacctccagggtggccgctctgtgagatgctcattgtcctttttttttgacacttcatcccctgagcctcgaggtgccctgctcatgctaggtaccatgctgaaggttggagggcagagatggcctccctgactttccgagtctctcacattctcttcctcttccctcagggtccacagagagtttcggagctgccaacatctcccaggcagcacgggaaagggactgtgagagtgtctgcttcatcggccggccgtggcgtgtcgtggatggccacctgaaccttcctgtatgcaagggtatgatggaggccatgctgtaccacatcatgaccaggcctggcatccccgagagctccctgctgcgccactaccagggggtcctgcagcccgtcgccgtgctggagttgctccagggcctggagtccctcggctgcatccggaagcgctggctgagaaagccaaggcctgtctcgctcttctctacacccgtggtggaagaggtggaagtgccctccagcctggacaagagccccatggctttctatgagcccaccttggactgtaccctccggctgggccgtgtgttcccccacgaggtcaactggaacaagtggatccacctctaggacccctgtgggcgtcccctccctcccagccaccgcctgccacaccactcctgcagcaggggacgggtgctttggccagagtcacagactgacacgtttcccactgtactggaactctggaaagaggggctccccgacctgcccatcccccaggctcttctgggccttccccttgggaactggcctcatcacactgggagttggtgcttcttgtctctgggtctccagagtttgccccgcctgtgcacacctcacattccagactctagccatctcggcaggatctcctggctccttgagtgcccaggtgccaccaagaggaagggccttgtgggatacaccttgcagaatagggatcggtgtgccccgctgcgaggggccccccatgggggctgtggcccctccgcaggcaggacatcccaacccctggctgggactgaaccacccagagcggagcggctcccttttcagccttgtgagtcacctggcaggccccagctgggctggctgtccgtgtccctcagcctggctggtgattccttgcaggccagaaatgaagagtccctgtaggttttggttttgtttgttttattttgttctttcaccttttttcctcattaaaaaaaaaaagtccctgtggagtgtacttatttattttttgattaaagggaagtaaaatgc

SEQ ID NO: 4628 - DNA, 3210 bp, Homo sapiens
acacagagcatctcagcggtattccagacacagagcgccccagcaggattctagacacagaatgccaagccggattctagataaagagctcctcagtgggatcccagacacagagcgcctcagcgaagtcgtagataatagagcgccccagcgggatcctacacacagagcgccccagcgggatcctacacacagagcgccccagcgggatcctacacacagagcgccccagcgggatcctacacacagagcgcctcagcgggatcctacacacagagcgccccagcgggatccgacacacagaccgcctcagcgggatcctacacacagagcgcctcagcgggatcctacacacagagcgccccagcgggatcctacacacagagcgccccagcggggtcctagacacagagcgcctcaaaggagtcctagacacagagcgcctcagcgggatcctacacacagagcgccccagcggggtcctagacacagagcgcctcagcgggatcctacacacagagcgcctcagcggggtcctagacacagagcgcctcagcggggtcctacacacagagcgcctcagcggggtcctagacacagagcgcctcagcggggtcctagacacagagcgcctcagcggggtcctacacacagagcgcctcagcgggatcctggttggagagcgcctcagcggggtcctacacacagagcgcctcagcggatcctagatgcagagcccgtcagtgggttcctagatgcagagtccctcagcgggatcctggttgtggagcgcctcagcgggattctagatgcagagcgcctgagtgggattctagacacagagcgcctcagcctggtcctacacacagagcgcctcagcgggatcctggttggagagcgcctcagcggggtcctacacacagagcgcctcagcgggatcctggttggagagcgcctcagcgggatcctagatacagagcggctcagcgggattctcgatacagagcccctcagcgaatcccagatacacagcgcctgagtggtattctagatatagagcacctcagcggatcctagatacagagcgccttagctgggttctggacatagagtgccttagcaggaaacagatatgaagccctgtcacagaggtctttgctatgttaggattgcttaggagaagggaagtggcagtgaggtgtttggcaggacactggaattccataggaatctccataaggaggagtgcatgccctgcctttcctggacacagtccacacagttagctgttaacttcatagaacaaaagaaacaaaacccacattcattaaaacaaacaaactagtaataaagataaggaaaccccaaacaggaagatctatctctgaaaaaaagtagtttcaaaatctgcggagaatcaccatagccctgtggtaaaacttatgaattgtggtctgttccttgtacatgagagtccaaatcctcttttataattggcatagaaaaaatgtatttgccaactaaatggctgtatactgcttatctgaggccaaataaactacacagcaaagatgtcagatctggcacagtagttgtgcctgaagttatcatgaagtgagtttgcaatggttaacagtcatcaactcagaccatgtgtccaacataacattcttctttttcagtgtaaaggaaatagctattggttatttgggggaaacttccatgtttacttactacaacattgcagtccttcctactacagatccagctacctcgtctgttaactaccttcatgtttgaaaattggcttagatccaccctcagtatcctggttcatgcttgatttcttctgctggtgtactttgaatagtggtatagacaaaactgtgtaccctcccaaaatgtgtatgttgaagccctagcccccagtgtgacagtattcggtgatagggcctttaagaaggtaattaaggttaaatgaggtcacaagggtggggccctgattaaataggactgatgtctttataagaagaggcagagacaccagacagctcttgttctctttctgtctttgattgagtctagaaccaaggccatgtgagaacacagcaagatggcctcatggtagcagggatggaggttatgcatgggatcagcaacatggactgccactcaccaaggctgacctggctatggccacggttgcgtgcccaatttgccagcagcagagaccaacactgagccctcaatatggcaccattcctcggggtgatcagccagctacctggtggcaggttggttatatgggacttcttccatcatggaaagggcagaggtctgtcctcactggaacagacacttactctggctgtgggtttgcctaacctgtatgcaatgcttctgccaagactaccatctgtggactcacggaatggcttatccaccatcatggtattccacacagcattgcccctgaccaaggcactcactttacggctaaaaaaagtgcagcagtgcacccatgcttatggaattcactggtcttatcatgttccccatcatcctgaagcagctggattgatagaacggtggaatggccttttgaagtcacaatcacaatgtcaactaggtgacaaagctttgccgggctggggcaaagttctccagaaggcagtgcatactatgaatcagtgtccaatatatggtactctttctcccatagccaggattcacgggtctaggaatcaaggtgcagaaggagaagtggcacctctcaccatcacccctagtgatccactagcaaagtttttgcttcctgttcctgcaacattatgttctgctggcctagaggtcttagttccagagggaggaatgcggctaccaagaaacacaacaatgattccattaaactggaagttaagattgctacctggacactttgggctcctcctacctttaagtcaacaggctaagaagagagttacagtattgtctgaggtgattgacccagactttcaagatgaaatcagtctactatgccataaaggatgtaaggaagagtatgcattaaatacaggagatccactagggcatctcttagtattaccatgccctgtgattaagatcaatgagaaactacaatagcccaatccagctagtactataaacagtccagatccctcaggaacgaaggtttgggtcactccactt

SEQ ID NO: 4629 - DNA, 4120 bp, Homo sapiens
gacagttaacacaacctggagtagcccatgccatactgtgtccttttaagtcagtaaattgaactaagtcggttattcggcaagcagttcctataaaaaactacatggctaaggttcttaatgattgaccacaagcagatctttcaccctcggatctctagctacaaaaggaaccactggctcaatgacctgtaagggccgtttcagcacatccattctgtccatctccaagccttcaccgtagggaagaacttttgctctcagtcacctctcagagagctctctttatagctgaaggtccctctcatgagttacatcaagagtaacctagaattatatcagcaatacacagccatggcccccaagctactggcccgcatctccaaactcctcatgatctgccagaatgcaggcatttctgtaccaaaaggcatcagaaacatctttgagttcacttgggaagagctcatcagtgacccttcagtgcctaccccgtccgacatcttgggcctggaggtcagctttggagcccccctggtggtgctcatggaacccacctttgtgcaggtccccacactgaagaagccactacctccaccaccaccagcaccaccacgtccagtgctgctggcaaccactggggcagccaagcgctccaccctctctcccaccatggcccgtcaggtgcgcacccaccaggagaccctgaacaggtttcagcagcagtccatccacctgctgacggagctcctcagactgaagatgaaggccatggtggagtctatgtcggtgggtgccaaccccttggacatcaccaggcgctttgtggaggccagccagctcctccacctcaatgccaaggagatggccttcaactgcctgatcagcacagccgggagaagtggctacagcagcggacagttgtggaaagagtccctcgcaaacatgtccgccattggggtgaactcgccttaccagctgatctaccactcttccacagcctgtctgagcttttctctctctgctggaaaagaagccaagaagaaaataggcaaatctagaactacagaagatgtcagcatgccgcccctgcatcgaggagtgggaacccctgccaacagcctggagttcagcgacccctgccctgaggcccgggaggagctgcaggagttgtgtcgccacatgtgctcagactctcagccccacctctcacccatcttctgccaaccatcatttcagtcagcattgtcaagaggggaaggcacccaagaaggccttcaagtttcattacaccttctatgatggctcctccttcgtttaccagctatccctctggaaacgtcgctgtatgtcagatccccacatgctgcagagggagaaccatcacctgcctctttaatgacatacctggattctccttgctggccctattcaatactgaaggccagggctgtgttcactacaacctaaaaaccagttgcccatatgtcttaatcttggatgaggaaggtgggaccaccaatgaccagcagggctatgtagtccacaagtggagctggacttccaggacagagaccctgctttccctggaatacaaggtgaatgaggaaatgaaactaaaggtactgggacaggactccatcacagtcaccttcacctccctgaatgagacagtaacactcactgtgtcggccaacaattgtccccatggaatggcatatgacaaacggtttcaggcatggctggatccaggccctgaaatgattccaccagatcttcgcatctcttggctctgctttcctctttgttggcttcattctcaaggagtttctctcctgttgatgacaagatgaccatgaacatctctgggctattattataccagctttagtgcccctggaagaaggagggcttctgtttcctaaacactccagtagaaatgccaacatcaacactcattggctctattaactgcccatgcgtgaaacattccctgtggccaggagtatgtattgctcccattgactaggcttgaggctcatgtccatcctgggggccaatgtgtcagattactctcaaatgaaccacctgggcaaaggataaagcagaagagtttccctaaaggaaaatcaaggtgctgttaccaggagaagaaatgatgctgagtagaaaactaccagtgcatgttgatgaccctctctctaccaccctcttctcatcccagctgaaccgcagaatcagcaacatggacgacaaggtgtataagatgagccgagccctggctgagatcaagaagcggtttcagaagacagtgactcagttcattaattctatcttgctggccgcaggtctgtttaccattgaatatcccaccaaaaaggaggaggaagaatttgttcggttcaagatgagatccagaactcatcccgagcggctccccaagctaagtttatactcaggagaaagtcttttacgatctcagtcaggccacctggaatcctcaattgcagagactttgaaggatgagcctgagtctgctcctgtgagcccagttcggaagaccaccaaaatccacaccaaagccaaggtcacatccagagggaaggcccgcgaggggcgcagccccaccaggtgggcggccttgccctcagactgcccgctggtgctgcggaagctcatgctcaaggaagacacccgtgctggctgcaagtgcctggtgaaggcgcccctggtctctgacgtggagctggagcgcttcctgttggcgccccgagaccccagccaagtgctggtgtttgggatcatctcaagccagaactacaccagcactgggcagctccagtggctgctgaacactctctacaaccaccagcagcggggccgtggctccccctgcatccagtgccggtatgactcctaccgcctgctgcagtatgacctggacagccccctgcaggaggaccctcccctgatggtgaagaagaactctgtggtgcaggggatgattctgatgtttgccggggggaagctcatttttgggggccgtgttttgaatggatatggcctcagcaagcagaatctgctgaaacagatcttccggtctcaacaggattacaagatgggctacttcctgccggatgactacaaattcagtgttcccaactctgtcctgagcctggaggattctgaatcagtcaagaaagccgagtcagaagatatccaaggaagcagctcctcattggccctggaagactatgtggagaaggagttatctctggaggctgagaagtaggtgaccacatcagctgccagaatgggcgtggctcacagcaggccacctcggggctatttggccttgggcaagtcactacccccaggcgtggcctgggtcatgtccaaccatcgctgacatctagcccatgtaatcaacacaatattgggcgggcatgcaggctgccctggagctgctcgcagtggtctgggtggtagagatggaggccttttgtagactttgcagcagaaccccacagcccagacccattagtctgagaagggtggagactgccccgctgtctccttgcaagaaacttgctgcacctgttaaaggccacttacttgctggtgctggtaaccatgaaatgaatcacacattcggcatggcgtggaaatcacatatttctcatgaagatagaaaagcaaaattaggagcatgtagaaaggtcgcaggtgccaccggggccctctggttggaacagcacccaacagcctcacctgtgcaagggagagggccttgcccctcctggcccaaccgggcctgggctctgggcactgtgaagaacagcccttccgcctcccggccctctattttgatctttaggacaagagagcctgaagtggagctacatcctctcagcagggacagcaagataactagttggaagaagcaggcctccaagaagtagcgccatcctggcagcagccaagtgagccaggccccggcccggggtgctggggcttcttgccagcccagccctgcctccccggtctcccaccctgtcctccaagcttctataataaaccagcgggcctccagcattggggtgaggctctggggaaggac

SEQ ID NO: 4630 - DNA, 3558 bp, Homo sapiens
tgtgactcctgttccaaaccacttgagggcgcatgagaaagtgtcttggacatgaagatagacgcctccatcaatcccaccaatccactctccccacaccagcctacctctttctcttttcctgtgctgttcctgccccctcatttctgtctttttaaagtgcctcctctctaaaactttacactttcttatgatcactaatgccatcctcactttgtatttttctaccatttatatctaccttacctgggattcttaaagcacttacgaagataagatatttatttatttattattatttattgagacagagtctcgctctgtcgcccaggctggagtgcagtggcacaatcttggctcactgcaacctccgcctcccgggttcaagcgattctcctgcctcagcctcccgagttgctgggattacaggtgtgagccaccacgcccagctaatttttgtattctttgtagagaggttttcatcatgttggccaggcaggtctcaaactcctgacctcaggtgactggcccatctcggcctcgcaaggtgctgggatgacaggtgtgagccacctcgtccggtcgacatatttattttctaacagacccaccttcctcatttaattgaaagctctgtgggcaagaactgtctgatttccctttgcacgtccccacggtagcctctgtagggactggcacacagcaagtttccattaacatctactgaatggaatagataccaaatatataattccatttccttggagtgaatcttttcttatctccaggcctggtaagtggcttctatgtctaaagaaggcgagacccttgctgcctctgtcatgacttctgatcttcagtggttccaacccagagactggactctcccctttggaatcctctgggttctagagcttctacaaaaaaacatggtcttcagccaaactatctttgccagggtggtatttgtttttaagacaatgcttttattctttgatatttgcttcctcagagtcattagatgatttctttacctttcatctcccaccagaacctctggccatgattcatttgagaaatatttattgagcacctatctaccctgtgcatttgtagcccctgggaatatagaagcaaacaagacacgagagtctctgctgcatgaagcctgcattccagtggagtctagtggtgctcttgatccctcatttatgtctttgtgataggtcacatctataaagacacaagtgttcagaacaaaggatgtgagagggtccccgtttatacccttctgatcacctctggaagatataattagtaatcagccccactttttaaaaggaatttgacaaattagacacactacagtagtgatccccaacttgggatcattttgcaccagctcctgctaccctagccaaagacctttacaatctctacagacatttttggttgccacaatctgggggaagagtctctgacacctagtgggtagaggctcgggaaagctgctaaacatcctataatgcaaaagacagctcctgataacaaataattatctgccccaaaatgtcaatagggcacctgttgataaactctgtactagaggaagagaactgagtcataagaacaccttggccctcaatcatcttggaggaagtgagggccagggtgtgtcagacaaaataaatttaccacaagggactctaaactggtagaactcaaggaaaatgagaaaatgcatgggctatgtgggaaggtaatgagctctctgtcactggaagtatcctagcagaagttgggcagccactctacagggatgctaagaagagcattcaaattctagcatctgggagcatgaggacattcaggctgggtctgtcaccccaaagacagttttattatgcaacaggccccagcacgcagactgtgagagggccagggaatgggagtgatcatttctggctcacttccccctttctcctctcccctccaggtcggtcctgtcagccttctggccatcggggtcctcaccgtgcactgcatggtcatcctgttgaactgtgctcaacacctcagccagagactgcagaagacttttgtgaactatggagaggccacgatgtacggccttgaaacctgcccgaacacctggctgagggcccatgcagtgtggggaagatggaatttggctctgtcacccaggctggagtgcagtggcaagatctcagctcactgcaacccccaccttcagggttcaagcaattctcctgcccaagcctcccgagtagctgggatttacaggtacactgtcagcttcttattagtcatcacccagctgggcttctgcagtgtttattttatgtttatggcagacaatttacaacagatggtggaaaaagcccacgtgacctccaacatctgccagcccagggagattctgacgctgacccccatcctggacattcgtttctacatgctgataatcctgcccttcctgatcctgttggtgtttatccagaacctcaaggtgctgtccgtcttctcgacattggccaacatcaccacccttgggagcatggctctgatctttgagtatatcatggaggggattccatatcccagcaacctacccttgatggcaaactggaagaccttcttgctgttctttggtacagccatcttcacatttgaaggcgtcggtatggttctgcctctcaaaaaccagatgaagcatccacagcagttttcttttgttctgtacttggggatgtccattgtcatcatcctctatatcttactggggacactgggctacatgaagtttgggtcagacacccaggccagcatcaccctcaacttgcccaattgctggttgtaccagtcagtcaagctgatgtactctatcggcatcttcttcacctatgccctccagttccacgtcccagctgagatcatcatcccgtttgccatctcccaagtgtcagagagctgggcactgtttgtagacctgtctgtccgctcagccttggtctgtctaacctgtgtctcagccatcctcatcccccgcctggacttggtcatctccctggtaggctccgtgagcagcagcgccctggctctcatcatcccagccctcctggagatcgtcatcttttactctgaggacatgagctgtgtcaccattgccaaggacatcatgattagcatcgtgggccttttagggtgtatatttgggacataccaagccctctatgagttgccccaacccatcagccattccatggccaactccacaggtgtccatgcataattatctgtttttattctaatagctctcccttcctcccatccccagtttgacttccatgtggatgttatataccttcatcaaatcccaacatctctatattaattagtggcgtctttatctttccaagagaaatgcagatgagaaaagttagcactgatgtctctcaggctacacctcttttggttttatattttttggatggccttttgtacctctgaaccaaaattagattcaactattcatat

SEQ ID NO: 4631 - DNA, 3445 bp, Homo sapiens
atgtaattatgtaacagtcacgtgacctgttatggaacttccaatggcaactaaaagcacatgcagctagtggatttcatcggagtgtttgaggttcccgtcttgaatgtgactgtcggaactactgtccgggggggtggtgcatttttctgagtttaagcaggagtcgggagtccccaaaagggaacacaagacaccttgatcctggcatatcttgtgtgccctctgtgggcctcagtttgtttcacaggattgaaaacctgggaagttagatgctcatctcatctgaagaagttgttctgcctttgttaaggtggagcgggaatagtcagcactgggacatgagaatggacagtcgcctggacccacctagggattcaccatttgctaaatgtgtgagctgtgggctcggccctgggggcactttaggaacatgactagtcttcccctgcagtgtggaggacacatgtgccacagagcccagctttgtgctcggtgccagagaggcttccggaggcaggcagggctgcgtgcagcctggaaggatgagccaggccaggcgggaaacggaagtccaggtagaagggaggagccgaattggggtacactccatatgggctcaggcaggtcagcctgtggaatgaatagaggccaacatgcaggccagcccggaatgcggcaggagtgacagtggctttccgtttctgggaattctgccagtacctacagtggtgccttttgacttggcttaccttttttctcgacatgcaggcagcgtctatcccagactaccggggccctaatggagtgtggacactgcttcagaaagggagaagcgttaggtaagcgggccaggcatggcctcccacataggctgggcagcggcagcacgggcctgagctccagctctcctcaccttgccttcctttctgcctggcagtgctgccgacctgagcgaggccgagccaaccctcacccacatgagcatcacccgtctgcatgagcagaagctggtgcagcatgtggtgtctcagaactgtgacgggctccacctgaggagtgggctgccgcgcacggccatctccgagctccacgggaacatgtacattgaagtgagcagtcctgcagggacccagggtctccatgggcaggcgggtcccactcactgtgccctcttgcctctaggtctgtacctcctgcgttcccaacagggagtacgtgcgggtgttcgatgtgacggagcgcactgccctccacagacaccagacaggccggacctgccacaagtgtgggacccagctgcgggacaccattgtgcactttggggagagggggacgttggggcagcctctgaactgggaagcggcgaccgaggctgccagcagagcagacaccatcctgtgtctagggtccagcctgaaggttctaaagaagtacccacgcctctggtgcatgaccaagccccctagccggcggccgaagctttacatcgtgaacctgcagtggaccccgaaggatgactgggctgccctgaagctacatgggaagtgtgatgacgtcatgcggctcctcatggccgagctgggcttggagatccccgcctatagcaggtgagtgagccgctgcagcagcctgcttccccgcacctctgtgtgctgggccttgtctgtcttctctcgtgagctgagtgtggaggaagctctgaggtgtttgcagtggtgcctgaggcatgactgaagcgtggtggtctccagagggcctgacctcggtggttggcggagaccctgcgtgtgccactcctgccctggctgatgtggcacacacaatccccgcggggagagggattctgcccgcgtgctcctgctccaggcctccccgtggagctctccgagatgcctggtgggaagcatctggaggggacgagcactcggcagctctggtcagacagaatctgtgtgcttggttttgggagttggcgtactttgggaaagcttaaacaaactgtgccttaatacagaatttgtgataatttagacttggtgtatgtattgagtaaaaagtttacactctctttctctgtgaattttcagggtcttataggggaaatcaataacttcttttaatcaaagggttcaagaaattaaggatcccttcaccttctgggcctggcacttcttgtatgttatgtgtgtggtgttctgtgatgtgggctatcgtgtactgtattttttttttacattaacttagctcattttccttatcagtgcgtatctgtatcttaagttatgatctgtggttctgcatctccgtcagacacatgctttcttcacggggtcgtctgtaggccacgcctccctagtcagctgggaagggggagagggtctggtccacctgccccagcggtacaagtggaaggtggggcccagagttgctagtgactcatccctggagacggaggcagccctggggccactgctgccccaccctgtgtgtgcacgccgctcagtggtggacaaggacacggagttttgaggagaccgagctagtgtgggtgccgacctttgagtcaccacctaagaggtgacctctcccacatccgttctgcagcttggtaacaatgaagctgccgccaaccagagccccgccgcagttgacacgggagggaaggggatgggaaggcagggaccgcagacagctttcccgagctggggcaggtgtgactgcgagaggctcccaggcccgcctgatgccgctttccctttttggcaggtggcaggatcccattttctcactggcgactcccctgcgtgctggtgaagaaggcagccacagtcggaagtcgctgtgcagaagcagagaggaggccccgcctggggaccggggtgcaccgcttagctcggcccccatcctagggggctggtttggcaggggctgcacaaaacgcacaaaaaggaagaaagtgacgtaatcacgtgctcgatgaagaacagttggcactttgcagatggccagtgtcacggtgaaggctgggttgcccccacgggtctagggagaacgaactctttggggatgacattttcaccgtgacatttttagccatttgtccttgaggaagccccttgcactgctgcggttgtaccctgatacggcctggccatcgaggacacctgcccatccggcctctgtgtcaagaggtggcagccgcacctttctgtgagaacggaactcgggttatttcagccccggcctgcagagtggaagcgcccagcggcctttcctcgctcaccaggccagtctcagggcctcaccgtatttctactactacttaatgaaaaagtgtgaactttatagaatcctctctgtactggatgtgcggcagaggggtggctccgagcctcggctctatgcagacctttttatttctattaaacgtttctgcactggc

SEQ ID NO: 4632 - DNA, 2108 bp, Homo sapiens
aatttcttttcaatattagcttattcccaaattggctaatgggtatttttaaagccatgctaaattaaaggaattcaattttctcactagtatttggtaacacatgggagactatgtgtcatatccagaagagttctgtacatgaactgcatttaattgctccgagagtcactggagctttctttaatcagaatggaaatcaggataagctgaggtcttatagattggtggtacttaaggcagaaaattaacaccgtgttttgtagctgttagttggtagagggaaattcaggctaccgtcgcgaaacctgcaggttaagttattttctcctccctgcttctgtaggttcacagcgttcccttctgatagagctttttgtctgtgttgtaaagctctttggctgagatggatgacaaagatattgacaaagaactaaggcagaaattaaacttttcctattgtgaggagactgagattgaagggcagaagaaagtagaagaaagcagggaggcttcgagccaaaccccagagaagggtgaagtgcaggattcagaggcaaagggtacaccaccttggactccccttagcaacgtgcatgagctcgacacatcttcggaaaaagacaaagaaagtccagatcagattttgaggactccagtgtcacaccctctcaaatgtcctgagacaccagcccaaccagacagcaggagcaagctgctgcccagtgacagcccctctactcccaaaaccatgctgagccggttggtgatttctccaacagggaagcttccttccagaggccctaagcatttgaagctcacacctgctcccctcaaggatgagatgacctcattggctctggtcaatattaatcccttcactccagagtcctataaaaaattatttcttcaatctggtggcaagaggaaaataagaggagatcttgaggaagctggtccagaggaaggcaagggagggctgcctgccaagagatgtgttttacgagaaaccaacatggcttcccgctatgaaaaagaattcttggaggttgaaaaaattggggttggcgaatttggtacagtctacaagtgcattaagaggctggatggatgtgtttatgcaataaagcgctctatgaaaacttttacagaattatcaaatgagaattcggctttgcatgaagtttatgctcacgcggtgcttgggcatcacccccatgtggtacgttactattcctcatgggcagaagatgaccacatgatcattcagaatgaatactgcaatggtgggagtttgcaagctgctatatctgaaaacactaagtctggcaatcattttgaagagccaaaactcaaggacatccttctacagatttcccttggccttaattacatccacaactctagcatggtacacctggacatcaaacctagtaatatattcatttgtcacaaggtgcaaagtgaatcctctggagtcatagaagaagttgaaaatgaagctgattggtttctctctgccaatgtgatgtataaaattggtgacctgggccacgcaacatcaataaacaaacccaaagtggaagaaggagatagtcgcttcctggctaatgagattttgcaagaggattaccggcaccttcccaaagcagacatatttgccttgggattaacaattgcagtggctgcaggagcagagtcattgcccaccaatggtgctgcatggcaccatatccgcaagggtaactttccggacgttcctcaggagctctcagaaagcttttccagtctgctcaagaacatgatccaacctgatgccgaacagagaccttctgcagcagctctggccagaaatacagttctccggccttccctgggaaaaacagaagagctccaacagcagctgaatttggaaaagttcaagactgccacactggaaagggaactgagagaagcccagcaggcccagtcaccccagggatatacccattatggtgacactggggtctctgggacccacacaggatcaagaagcacaaaacgcctggtgggaggaaagagtgcaaggtcttcaagctttacctcaggagagcgtgagcctctgcatt

SEQ ID NO: 4633 - DNA, 1986 bp, Homo sapiens
cttccaatctttccttccatagctctcatcaccttcatatatttcttccatctttctcctcccacctgcctcgccctctgtatatacccccactctcccccttttatatcttctccatctccccccatatctttcctctatgtccacatctgtgtattccccccaacttcccctccatatatcttttttactccccttttcctccctgtatcctctgtgttccccccatcttgctctacatcattcttcccaagatctttacgtctcccatcttgatctctccatctccactttctcctaacattttcatttccgttccttagtgtctctagagagatcattcttgatagcctcagctctttctctgtgtttttcaggtttgtattctgctctgctctacctctcctccttgccccttttctctcccaggatgtctctcctttccaaatcctttttgtacctgaatactttttgccccaccctgggctctcatttccatctcagaccttagcctgggatctaaagggctgacagtgtccctttcttcatgcagatgacagtcgtctagaggagctcaaagccactctgcccagcccagacaagctccctggattcaagatgtaccccattgactttgagaaggtatggggtggggctcaggacagggaaggaggatgggcaaagcatagacaggctggagaaaacaggagtatctggagccagccccgggcctttgtggggatcaggttgtgggcctgccatatggctctgaatgagtaggtgttcccagccatccctttgtgatctgggagagtctagcaggcaattgcagtggaggatacacatcttctttatctgatcctctccccactgccttcacaccctccccactcataacaggatgatgacagcaactttcatatggatttcatcgtggctgcatccaacctccgggcagaaaactatgacattccttctgcagaccggcacaagagcaagctgattgcagggaagatcatcccagccattgccacgaccacagcagccgtggttggccttgtgtgtctggagctgtacaaggttgtgcaggggcaccgacagcttgactcctacaagaatggtttcctcaacttggccctgcctttctttggtttctctgaaccccttgccgcaccacgtcaccagtactataaccaagagtggacattgtgggatcgctttgaggtacaagggctgcagcctaatggtgaggagatgaccctcaaacagttcctcgactattttaaggtaaggcccctcccttactctgtcaccccacctcagggggcgaggtgtacacggtgacttgctggcctgtccacctccatgaccctgctgttccccctccctctccagacagagcacaaattagagatcaccatgctgtcccagggcgtgtccatgctctattccttcttcatgccagctgccaagctcaaggaacggttggatcagccgtgagttggacactggccaggctaggggaggccctgtatgggttggggagcctcatcatccagctgtcccactccagttcactgcccctacctacctgcccatcctctcttgctttctgccctcctgaccctatactcccatccccctatccccaggatgacagagattgtgagccgtgtgtcgaagcgaaagctgggccgccacgtgcgggcgctggtgcttgagctgtgctgtaacgacgagagcggcgaggatgtcgaggttccctatgtccgatacaccatccgctgaccccgtctgctcctctaggctggccccttgtccacccctctccacaccccttccagcccagggttcccatttggcttctggcagtggcccaactagccaagtctggtgttccctcatcatccccctacctgaacccctcttgccactgccttctaccttgtttgaaacctgaatcctaataaagaattaataactccc

SEQ ID NO: 4634 - DNA, 2098 bp, Homo sapiens
aaaaaaaaaaaaaaaaaaagtctgggagggtcttccgctgagcactgtgtgcccatcacgcgtggtgtccactgccagctgcccctgtgagtccctgtccttgcttggagcctgctgcttgtctcagatccttggacccagccctgaccccagtccagctaagctcaaccctgaccggtcctccttcgagactctttcagcctaagatctccaaccagacctgcccgccatgtcggctgcgcccggcctcctgcaccaggagctgtcctgcccgctgtgcctgcagctgttcgacgcgcccgtgacagccgagtgcggccacagtttctgccgcgcctgcctaggccgcgtggccggggagccggcggcggatggcaccgttctctgcccctgctgccaggcccccacgcggccgcaggcactcagcaccaacctgcagctggcgcgcctggtggaggggctggcccaggtgccgcagggccactgcgaggagcacctggacccgctgagcatctactgcgagcaggaccgcgcgctggtgtgcggagtgtgcgcctcactcggctcgcaccgcggtcatcgcctcctgcctgccgccgaggcccacgcacgcctcaagacacagctgccacagcagaaactgcagctgcaggaggcatgcatgcgtaaggagaagagtgtggctgtgctggagcatcagctggtggaggtggaggagacagtgcgtcagttccggggggccgtgggggagcagctgggcaagatgcgggtgttcctggctgcactggagggctccttggactgcgaggcagagcgtgtacggggtgaggcaggggtcgccttgcgccgggagctggggagcctgaactcttacctggagcagctgcggcagatggagaaggtcctggaggaggtggcggacaagccgcagactgagttcctcatgaaatactgcctggtgaccagcaggctgcagaagatcctggcagagtctcccccacccgcccgtctggacatccagctgccaattatctcagatgacttcaaattccaggtgtggaggaagatgttccgggctctgatgccagcgctggaggagctgacctttgacccgagctctgcgcacccgagcctggtggtgtcttcctctggccgccgcgtggagtgctcggagcagaaggcgccgccggccggggaggacccgcgccagttcgacaaggcggtggcggtggtggcgcaccagcagctctccgagggcgagcactactgggaggtggatgttggcgacaagccgcgctgggcgctgggcgtgatcgcggccgaggccccccgccgcgggcgcctgcacgcggtgccctcgcagggcctgtggctgctggggctgcgcgagggcaagatcctggaggcacacgtggaggccaaggagccgcgcgctctgcgcagccccgagaggcggcccacgcgcattggcctttacctgagcttcggcgacggcgtcctctccttctacgatgccagcgacgccgacgcgctcgtgccgctttttgccttccacgagcgcctgcccaggcccgtgtaccccttcttcgacgtgtgctggcacgacaagggcaagaatgcccagccgctgctgctcgtgggtcccgaaggcgccgaggcctgagccgccggacgggtagtggaggggcgcgggggcctgggttgaagcttaggtctccttggtcgggtctgacgggagaagggtggggagcgggttgccagggcccagggggctgggaactgggggatctcccagaatactgacaagcgtggggtaggactggcttggtggctcatgcctgtaatcccagcactttgggagacggaggcgggtggatcacctgaggtcaggagttcaagaccagcctggccaacatggtgaaactcctctctactgaaaatacaaaaatgagctgggcgcggtggcatacgcctgtaatcccagctagttgggaggctgaggcaggataattgcttgaacccaggaggtggaggttgcagtgagcagacattgcggcactgcactctagcctgggtgacaagagtgagactctgtctg

SEQ ID NO: 4635 - DNA, 2332 bp, Homo sapiens
gactcgcctctccgcgcccgacccgggagtagcggacacaccccctcccggcccggctgtccgcctccgcccagcctttcctcagcctgcttcatttttctcccagtcgtccagcctcccggtttccgactttgcactaagagggatgcactctggaaaaccacattgcgcggtcacatcttgtttggagaagaggccaggcttttgcatcttagagtatacgttcaccttttcaagggcctggcatagatttgattaatcagcctggaataccctgttcctgccgacctggccgtttttacctccgtaccttatcacactcccaggaacattaagcagggagcgcttggagtcttctttgggtccccaccttgagctagacgtgaagttgacccctgggctgcagcatggctgtcgccctcgactctcagatcgacgcgcccctggaggttgagggatgcctaataatgaaggtggaaaaggaccctgagtgggcatcagagcccattctggaaggatcggatagctctgagaccttccgcaaatgcttcaggcaattctgttatgaggatgtgactggaccccatgaagctttcagtaaactctgggaactttgctgccggtggctgaagccagaaatgcgttccaaggagcaaatacttgagctgctggtgattgagcagtttctcaccattttacccgagaagattcaggcttgggcacagaagcagtgtccgcaaagtggagaggaagcggtggccctggtagtgcatttggagaaagagactggaagactaagacagcaggtcagcagtcccgtgcaccgggagaagcactccccacttggagcagcgtgggaggtggcagacttccagccagagcaggtggagacccaacccagggcggtgtctcgggaggaacctggaagcctccactcaggacaccaggaacagctgaaccgaaagcgagaacgtcggcccttacccaagaatgctcggccttctccctgggttcctgcccttgctgatgaatggaataccctagatcaggaagtgacaaccacacggcttcctgctgggtcccaggaaccagtgaaagatgtccacgtggccagaggcttttcctacagaaagagtgtgcatcagattcctgcccaaagggacctctaccgggatttcaggaaggagaatgttgggaacgtggtctccctgggaagtgcagtgtctacatctaacaagataacccggttggaacagagaaaggagccatggactctaggtctgcattcctctaacaagagaagtatcctacgaagcaactacgtcaaggaaaagtcagttcatgctattcaggtccctgcaaggagtgcaggaaaaacatggagagagcagcagcagtggggtttagaagatgaaaagatagcaggtgtgcattggagctatgaggaaacaaagactttcctggcaattctcaaagagtctcgcttttatgaaacacttcaggcctgtccccgaaatagccaagtgtatggtgctgtggctgaatggttgcgagaatgtggcttccttagaaccccagaacagtgtcgaaccaagttcaaaagtctccagaaaagctatcgaaaggtgagaaatggccacatgctagaaccctgcgccttctttgaggacatggatgctttgttgaaccctgcagcccgtgctccgtccactgataaaccaaaggagatgatacctgtccccagactgaagagaattgccatcagtgctaaggaacacatcagcttggtggaggaggaggaagctgcagaagattctgatgatgatgaaataggcatcgaatttatccgcaagtctgaaatccatggtgcccctgtcttgtttcagaatctcagtggtaagaattgtgctttgtttctctggtaggaaaacagatgtgtgatcttgtggaaaaaggagtagaccagaagtggccaaacccggggggtgctgtcacacacacctcaccactttcactgtggtgtggccacatcactgaagtactctcaggtgcttgctgctgcccccattgcagtcagagtaacagctccaagtggccgtggagaagtcgttttcactttagagcacagcatggattttgagtgtttgggtccttgtggaaggaagacaaatggagttacagggttctaaggatcttgtattatctgataattggcataaagcaatcaattgtattgcattataagtcaagcatgcattattacgttatctaaaataaccagtacaaaattttgtaacagtttcaacaggttttcattaaaaataaaataaac

SEQ ID NO: 4636 - DNA, 2270 bp, Homo sapiens
aattgacagttaccactctccggaagtggtctgtcatcttgcttcccgggcactgtgctctcctgttttctatcagcttctctagccactccttccctgtcttctttgctgattcctcctctgttccttggggctgatcctgggccacttttctctctgagccctctcctcaggtgatctcttccattctcttggtattacatagcatccatgtgttggtgactcacaaatttttttgagcccagacatgtcccatgtgttccaactcgaggttctaactgcccctgtgacatctgacaaacatctccagcttcatgtgttcaaaagggcaagggttgattggaccatggtactgttctcccttacctgcccaagaaggctatccccactcacccccgctcatcttgccttgtaaagggcatcaccacctatatctgctccaggcagaaaccacacgctccccagtcctgcatcaatcctgcctcctccatctccatgatgcctcttaactccctccacctctccatctccatggccaccacctgctctcacctggcgtcctcctccttggtcttctccttctacttttattcttgtcaactccattagacacagccagaggccacctcctaaaataggagctgacttatgtcccttttctcattaaaactcttcagtggcttcacatggcactgagaagaaaactcaggctccttcccagccctgtgcacatgtcccctgcatgtctccccacttcctctcctaccctgccctccttaggccctggcctccctcatcttctcctggttcccggagcacactgagctcttttccttcacaaggccttggagcatgctgctccatctgcctggaaacctctccctcaagactcagtacatgagtcacctccccatagatgcttcccctgaccctctgtgttggtctgctctggctctcataagaaaataccagagactgagtggcttaaacaaaagacatttattttctcacagtcctggaggctggaagtccaagaccaaggtgttcgcagggttggtttcttctaaggcctctctccttggcttggagatggccctggttggtcttctgagtgcaggtgtccctggtgtctctttgtgtgtccagattttctcttataaggacactggtgagattggatgaggggccccctgacggcctcatcttaatgtaatcacctctcttatctccatatccattcacatacgggccattgcgagctaccggggattaggggttcaacacataaattgggggtgggggggtgcagctcagcccataaacatgccccctctggctcgctctcccagggcatccatcgtagcacttagaaaaatgatcacttcttttttggctttgtggtggcatgtgtgtgtgtgtatttgtatatacacacacatatatataaatacacagacacacatatatacaaacacacgcattcattttcgtccacagttcctggctcataactcccacagcccttgttacactcttttgttacaacattgggtgtgtcaggcctcaggagacaatcactctaacctcctgcccttccttttacctgcccaagacaggactctaatcttccctacctttctgatggtgggtcataaaactcattccagagacggtcccaccccatatcctgctagaaggaatgctgctgtcatgaagcttccataaaaaccaaggggactggattcagagagcttccagataactgaacatacagaggttctagaagggtggtgcgcccagggagggcacaggaagctccatgcccttccttcatacctcaccctatgcatctctttatctgtatcttttataatatcctttataataaaccagtaaatgtatttcccttagttttgtgagccactccagcaaattgaacctacagagggaattgtgggaacctcaacttgaagccagtcggtcagaagttccaaaggtcacccgggcgcggtggttcacgcctgtaatcccagcactttgggaggccgaggcgggtggatcaggagtttgagaccagcctagccaacatggtgaaaccctgtctttactgaaaatacgaaaaattagctgggcatcgtggtgggcgcctgtaatcccagctacttgggaggctgaagcaggagaattgcttgagcctgagaggcagaggctgcagtgagctgagatcgcgccactgcactccagcccgggcaacagagtgagactgtctc

SEQ ID NO: 4637 - DNA, 1935 bp, Homo sapiens
agacttcagcttttaaattcctgccggagcagacacttctgttgtttagtctgccttgttcatcccgttcgtgtgagctggacattggacacttccccctctgttggcctcattcagcttgggcaggagcaggtgctaatccagcccctcaacaactcccagggcccattcagtggacgagaacatctgatcaggcgcaaatggtccttgacccccagcccttctgctgaggcccagagacctgagcagctctgcaaggttctaacagaaaagaagaagccgacgtggggcaggccttcgcgggactggcgggagcggaggaacgctatccggctcaccagcgagcacacggtggagaccctggtggtggccgacgccgacatggtgcagtaccacggggccgaggccgcccagaggttcatcctgaccgtcatgaacatggtatacaatatgtttcagcaccagagcctggggattaaaattaacattcaagtgaccaagcttgtcctgctacgacaacgtcccgctaagttgtccattgggcaccatggtgagcggtccctggagagcttctgtcactggcagaacgaggagtatggaggagcgcgatacctcggcaataaccaggttcccggcgggaaggacgacccgcccctggtggatgctgccgtgtttgtgaccaggacagatttctgtgtacacaaggatgaaccgtgtgacactgttggaattgcttacttaggaggtgtgtgcagtgctaagaggaagtgtgtgcttgccgaagacaatggtctcaatttggcctttaccatcgcccatgagctgggccacaacttgggcatgaaccacgacgatgaccactcatcttgcgctggcaggtcccacatcatgtcaggagagtgggtgaaaggccggaacccaagtgacctctcttggtcctcctgcagccgagatgaccttgaaaacttcctcaagtcaaaagtcagcacctgcttgctagtcacggaccccagaagccagcacacagtacgcctcccgcacaagctgccgggcatgcactacagtgccaacgagcagtgccagatcctgtttggcatgaatgccaccttctgcagaaacatggagcatctaatgtgtgctggactgtggtgcctggtagaaggagacacatcctgcaagaccaagctggaccctcccctggatggcaccgagtgtggggcagacaagtggtgccgcgcgggggagtgcgtgagcaagacgcccatcccggagcatgtggacggagactggagcccgtggggcgcctggagcatgtgcagccgaacatgtgggacgggagcccgcttccggcagaggaaatgtgacaaccccccccctgggcctggaggcacacactgcccgggtgccagtgtagaacatgcggtctgcgagaacctgccctgccccaagggtctgcccagcttccgggaccagcagtgccaggcacacgaccggctgagccccaagaagaaaggcctgctgacagccgtggtggttgacgataagccatgtgaactctactgctcgcccctcgggaaggagtccccactgctggtggccgacagggtcctggacggtacaccctgcgggccctacgagactgatctctgcgtgcacggcaagtgccagaaaatcggctgtgacggcatcatcgggtctgcagccaaagaggacagatgcggggtctgcagcggggacggcaagacctgccacttggcgaagggcgacttcagccacgcccgggggacaggttatatcgaagctgccgtcattcctgctggagctcggaggatccgtgtggtggaggataaacctgcccacagctttctgggtaaaacacaaatgacttgactcaccatttatgtgttgagaatcgattttgatgatcagtctggt

SEQ ID NO: 4638 - DNA, 3016 bp, Homo sapiens
ctggcagccctgagaagagctggtgtacactgagacccccccgccctccacacaatcccacccagtggttgggtctgggcaggacaccctgacacacgctcccctccccccccccacctgggtagatgaatgggatgatgcagtggttgtcatgacgatgagtgctagagaagtcaggaagagggtccctgtggccacagggaatagtctgccttggcctttgagggtggtgctaggggaactatgccactctatggccgtgctcgagaccatgtcacccatccttcaattctgggcacacgccctggccgacccatggctgggcccatcactgcagctgtacctgagaagatctgcaatggagccttctgctcctgcagtggggcttttcccctagatcccaacaatccatcgttagggcccttgccctcaatcagccacctaaatctgagaactcaggtgggctacgtaggagcagggtcccagtggggctggctgtgtgggtgggcaggtactgacaaagatccccatccatgctgggtttccagaactcctgagtggctctggggtccatagtggttgagtgagcactgacaagttcatgtcagtgccccctgctaggctgtgggctttagggaacccatggtgatcaagcaaatgctaataagagacccatttccatccttgtcccttgctcagatcgccatggatcggatgaagaagatcaaacggcagctgtcaatgacactccgaggtggccgaggcatagacaagaccaatggtgcccctgagcagataggcctggatgagagtggtggtggtggcggcagtgaccctggagaggcccccacacgtgctgctcctggggaacttcgttctgcacggggcccactcagctctgcaccagagattgtgcacgaggacttgaagatggggtctgatggggagagtgaccaggcttcagccacgtcctcggatgaggtgcagtctccagtgagagtgcgtatgcgcaaccatcccccacgcaagatctccactgaggacatcaacaagcgcctatcactaccagctgacatccggctgcctgagggctacctggagaagctgaccctcaatagccccatctttgacaagcccctcagccgccgcctccgtcgtgtcagcctatctgagattggctttgggaaactggagacctacattaagctggacaaactgggcgagggtacctatgccaccgtctacaaaggcaaaagcaagctcacagacaaccttgtggcactcaaggagatcagactggaacatgaagagggggcaccctgcaccgccatccgggaagtgtccctgctcaaggacctcaaacacgccaacatcgttacgctacatgacattatccacacggagaagtccctcacccttgtctttgagtacctggacaaggacctgaagcagtacctggatgactgtgggaacatcatcaacatgcacaacgtgaaagtgggtgtggggcaggaagcaggggcacaagggggcccccactcacccactccaacccacaaatctcccagaaacggacttttccctttggctttttttgctaggagcccttggagggcactgggaccctgtcctcttttgtgtgacaaggctctgggcctagtgtctgtgtttgggaggggagcagtgcctgctgggggtcgggctagtggatagtctttgacctctgcctgccattcctgggtccccagctgttcctgttccagctgctccgtggcctggcctactgccaccggcagaaggtgctacaccgagacctcaagccccagaacctgctcatcaacgagaggggagagctcaagctggctgactttggtaccactggcctcccctttcttattggctccccagcctcctactttcccatgaccacttagtctcacttcccttcagccttgccagattttgcctaggacaccctcagtctcaactgcactctccccgagactttgcccatgactccctcattctagctgtcctttctctgatttccaggcctggcccgagccaagtcaatcccaacaaagacatactccaatgaggtggtgacactgtggtaccggccccctgacatcctgcttgggtccacggactactccactcagattgacatgtggggtgtgggctgcatcttctatgagatggccacaggccgtcccctctttccgggctccacggtggaggaacagctacacttcatcttccgtatcttaggaaccccaactgaggagacgtggccaggcatcctgtccaacgaggagttcaagacatacaactaccccaagtaccgagccgaggcccttttgagccacgcaccccggtgaggctggtgggtgggtgggcgttaggggccagagtgtccaaactcattttaaatcaggtctctttgtccttgtggcagacttgatagcgacggggccgacctcctcaccaagctgttgcagtttgagggtcgaaatcggatctccgcagaggatgccatgaaacatccattcttcctcagtctgggggagcggatccacaaacttcctgacactacttccatatttgcactaaaggagattcagctacaaaaggaggccagccttcggtcttcgtcgatgcctgactcaggtaggtatagccccttgtcttcctccctgccccacccacctacctgcttacccaccaacagccatctgctctgctttcccccacaggcaggccagctttccgcgtggtggacaccgagttctaagccacagaccgaggccccagcaggcagcggctggagggatgccacacccctcacagggcagcccccaactacatcttccctgcttactctctgcctacctgcctgagccatgttcacctgcccacttgtcccctgctgcctgcccaaacaccccaccattggcctgtcaacccacccattggcctgtctgctgggtgctaacaaagctctcatcactccttc

SEQ ID NO: 4639 - DNA, 2740 bp, Homo sapiens
attcacaaggaatttgtgttcctaaggtagttgtttttgttttttgttttttatttttgagacacagtcttactccataattcaggctggagtgcagtggcatgatgatcacggctcactacagcctcgacttcacaggctcaggtgattttcccacctcagcctccagagtagccgggaccacgggcacgcaccaccacacccagctaattttttgtatttttagtagaggcagggttttgccatgttgcccaggctggtctcgaactcctgggctcaagcagtctgcccacctcggcctcccaaagtgctggattacaggcatgagccgctgtgcccagcccaagataattttcatactcttcataggtagcagtttcatagccttagaaattcaggcagcaaggtactgtgattggtgtatatggacttatctttggagtaaaacaggcactcatcagatagtagctcttgctaattagcacatggactattgaaattccttcctgttaatgccaatcagtcagattttgctacagaacacattttacagaactttctttctttctttcttttttttttgagacggagtttcactcttgttcaggctggagtgcaatggtgtgatctcgactcaccacaacctctgcctcctgggttcaagcaattctcctgcctcagcctcccaaataactgggattacaggcatgtgccaccatgcctggctaattttgtattttaatagagatggagtttccccatgttggtcaggctggttttgaactcctgacttcagatggtccgcccacctcggcctcccaaagtgctgggattaccagcgtgagccaccgcgcccagcctacagggctttcatatgggaaagttaatacttttcagtcctgtgggtctctttaaagcaataagatggcatccttcagtttactcagtggttgctcttgcttttacgcttacatttaatgagttttaaaagtacagttaaagtacttccctgtatttgacatctgtgtctcagtactcaaattttcttttttatcaaaggcattctttacatctgaagtcttacatttctccatatatacttcagtcttttctttgaagaggtttactccctctgctggctctaactgtgaaatgaaagcacgtgtaatctatatagttctgattaccaatctgagggattgcttgcatatgatggtattgccttagacttttttctaaaatgtaaaattaaacttttgtttggctccctctgattctgaataataaaattgcccaaaaatctaagaaatattttatattccttttgagaacaatatgaaattctatgaaactaacagtgatttgataattaagaaattctggcatgcacatttacaatatgtaataggtgctcaataaatattagtttcttgattgcagtcatatttttattgtacatagacattgtgtgtgtacttcattgtaggagcaataaatcacccattctgtttaatgaagtcatctgtgtttctgtagcactttctcaatgccttattatacttccagtaattattgatgaacttcaacattatactacaataaatgtcttctcatttgctgtacagacagccagaaagtataagtaattagaatttgttctgcactctacttttatcgtgaaaaagtaattgaaagtaaataagatatttattcagaaaagccactacctgaatgtgagcatatctgaactaataaaaatagtatagttaatacagatatatagcaagatgtcctcaccatctacatctgtaataatatatagtggtaattgactcccataatggttataccaaagccctgaaggattcttaacttttactttcatttttaatgcaaaaccaggttttcatatattttgcttgcttaaagcaagatatactagctcttatttttcttactaaattacatgcatacatatatttcaaattttattttagattatttgtgctcaaccccatacgttgtcatagagtagtgcttttcaactcgttttccaaggatcactaattctgtagaatgttaatagatgttatgtgagggggagaaagtcattcagctttgtaaatgctgaattaaatatttctttttgaacaaagctggaggcatcatgctacccaacttcaaactatactacagggctacggtaaccaaaacatcatggcactggtacaaaaacagacacatagaccaatggaacagaatagagagcccagaaataaaaccgcacacctacaactgtctgatttttaacaaacctaacaaaaacaaacaataaggaaaggattccctattcaataaacagtgctgggataactggctagccatatgcagaagattgaaactggaccccttccttatatacaaaaattatctcaaggtgaattaaagacttaaatgtaaaacccaaaactataaaaacccacaaagacaacctaggcaatacctttcaggacataggcacaggcaaagatttcatgacaaagactccaaaagcaattgcaacagaagcaaaaatggacaaacggaagttaactaaactaaagagcttctgcacagcaaaagaaactatcatgtttcttttgagtaaacagcctacagaatgggagaaaatttttgcaaactgtgcatccaacaaaggtctaatatggagcatctataagaaacatacaaatttacaagg

SEQ ID NO: 4640 - DNA, 2828 bp, Homo sapiens
cttcatataagtgggatcacgtaacatttatccttttgtgtctggcttatttcactttgcataatgttttcaaggttcatccatgttgcagcatgcataaaaacttcattccttaaggttgtatattattccattgtatgcatatgccacattttgtttatccattcatccattaataggcatttgagcttcttccaccaccttttggctattgtgaataatgttgctatggactttacagtacaaatgtctgaccaagtctctgcttttgattctttggggtatatacataaaagtggaattgctggatcatctggtagttttacatttcactttttttagggactgccatattgtcttccacagtgactgcaccattttatactccctaaggcaatacgcaagggttctaatttctccatattctcaccaacacttgttttctgttttgaggataatagccatcctgagaggcgtgatgtggtacctcattgaggtttcaatttgcatttccctaatgatttctgatgttgagtgttttttcatgtacttcttggccatttgtatatctcccttgaagaaatatcagtatcaagtcatttgctcatgtttaattgaactgctttgttgtggtggtttttactaagtttttggagttctttaaatatcctggatattaatctcttaccagtatatgatttacaaaagttttctcccattttgtaggttgcctttatcttctagatagtatcctttgatgcacaaaaaattaattttgatgaaatccaatttatctattttttggcataatatccaagaaatcattgctaaatccagtcactaagcttttctcgtgtgttttcttctaagagttttatagttttagctcttatgtttaagtcttcaatccattttgagttaacttttgtgcagggtgtaagaagtatttcatgatttcaaaattttgtgcgtggcataaggagtatttcctgattttaaagtatcaggaaatatttccaaaagctgatacctccagctttattgttctttttcaagattgacttcgctactcatggtcttttgtggttctatataaattttggaattttttttatttctgtaaagaaagtgccattgagattttgatagggattgttttgaatgcatagatcactttgggtagtatgggcatcttaacaatattaagtcttccaattaattaacatgggatatctttccatttatttacatcttctttgatttctttcagcaatgttttgtagtttttagtgttcaaatcttttaccctcttggttaagtgtattcctattttattctctttgatgttaatgtaaacggtcctttcagatcgttcattgctagtctataaaaatgcagctgttttcttggtgtggtgattttgtaacctgcaagtttgcacgattcatttattacttaacagtttacttgtgcagtctttagaattttctacctgtaagtttacgtcatctgtgaacagagataattttacttcttcctttccaatttgaatgcctttcatttctttttcttgcctagttgttctagcttgcctaattgctgtaggacttccagtcctgtgttaaatagaagtggtgagagtgactgagtatgatgcattggattttgaaatagaaatagacacttagtaaaaaaaacaaaaactgggaaaattctaataaagcctatagtttagttaatagtattataccagtgttcatctcttagttttcataattatactgtagttatttaagattttaatgctagaggaagcttggtaaagagtatatgggaaccccgcactatttttgtaactcctctgtaaatcataaatgatctcaaaataagttttttaatatctgaaggaaaataaaagcatacagagtaaatacattgggagtcctgaaatatctttctaggcaaataaggcatactttcacttttcattagttaattacccatagtaagtgtccaccacctctgccactctggtatataaagtcctagagggcaactggccagacatcacattaaagaagcactatggcactggactgagtcaattctgaatttcagctttggggatttctcagggcaaagttgtttaatatctctgaaatatgaaaatatctttccaggattgttgtgaatattaaataaggtcatggttaaaaaagcacttaatccatggcaggtatttaataaatatcctttcttttctcttgttttaaacatttaagactacaaagggaaaacgagatatggtacctttcacataagggccttacattctaaattgggacaaaatgtacacatatgttaaataattatcaaataatagctttacattctattacaagcaagtgctaagatccagtagcgagtgggacagtgtgcagcagagcacagcacacacaaaagtagagaaatgtgagctggcatccccggggcagccttcaaaggagtggggctgtactgagcttggtgtgcacagataagaaaatgttgggggtggtcgggtgcggtggctcgcgcctgtaatcccaacactttgggaggccaaggtgagtggatcacctgaggtcaggcattcgagaccggcctggccaacatggtgaaaccccgtctctactaaaaggtacagaaagttagccaggcctggtggtggacacctgtagtcccagctactcaggaggctgaggcgggaggatcgcttgggcccagaaggcagaggctacagtgatccactgtactccagcctgggcaacagagcgagaccccatctc

SEQ ID NO: 4641 - DNA, 2735 bp, Homo sapiens
attccacttccggtgtcttggtcttatcactgtaacttgagctgagactttacttccatgtctccccccaccctcaggagtcctcagggtttccactaaagccccctttcattgagcctacaagccttgctgggaggcacaggcagcgtccaccccgatgatgtcctcccgccggcatcccgcagccttcgccttcctggttcacctgtcgcttacctgtctcgctctctcacctctgctggtcagcagatctgaatatctctttgtgaggagtcagagaaaggagatgatgcaaagagaaggaagcaaaaacaaaactaaaagaactttgaaggtatatgagaagaaaaagctgaaaagaaaatgtctgcctcactccctcaaaaattctaccatagagcaaaggttgacgtccagaaaacctcaagtttatcagtcccagatgctggcagtagaagcataaagctgaggtgaattttccttactattttttccccagagtctagaacagtaactgcctcccaatgtctatcacagggaccagattttctccactacataggatgtgatatgtaggcagttaaatggcattatagacacaataagcaaaattgaaacagagacaccctgttggataaaatatttacatcggtgttctgtttccaaactgtgggctgagacctataaatgagtcatgaaatcaacctttgtgggttgcaaccagcattttcacaagaagggattaagaaacaacttcagaatgtatcttgtgtagtaacagtgactactgttttgcaaaatgtttgggtcagttgtacacatgcatattttacagggtgatgtaaaaaaaaaatgttttttttgagacagggtctcactttgtctcccaggctgaagtgcagtggcaccgtcatggctcactgcggcctcaacctcctgggctcaagcaatcttcctgccttagcctcctgtatatctgggactacaggtgtgcaccatcatgcccagctatttatttcatttttttgtagagccagggcctcactttgttacccagactggtctcgaactcctgggatcaagcaatcctcccacatcagcctcccaaggtgctgggataacaggcgtgggccaccgtgcctggcctgaaatgtctttttaactgtaggctggggtccgcaacgtttgagaagcactgaaatacagggcaatttattcactgtccaagaacattacttctatgatgtcttcagataaatttgaaaatatttgtcttacccaaaattccagttacatatccattttcaggatactctcttctgagtgagataaactcaacactggcaggtatagcaagaaaacaaaagactctgccaaatattgctgcagggtgagaaccaccagcacaatgtggaaatccagtgtaggtaaagattcgccccaaatgtgtgatcaggaaataaaacctgttaggtgtcagtgtcatgaagttcagtgtccaaatgttgtctttcttctggtaatggttacttttttttttttttcctgagataaggtttagcttttgtcactcaggctcgagtgcaatggtgcgatcttggctcactgcaacctccacctcccgggttcaagcgattctcctgcctcagcctcccgagtagttgggattacaggcacccgccaccacgtccagctaatttttgtatttttagtagagatggggtttcactatgttggccaggctggtctggaactcctgacctcaggtgatccacttgcctcggccttccaaagtgctgggattataggggtgagccaccgcacctggggtggttactgtttaaaaaaaaagtcacctgactcagacccactgagcacttggagaacatctacaggtagaaaacaaatgttacaaatatttaaatatcctgatggttttggaagtcaaggggagagagatcttacctctgtctaccacccaaccctctccaccaaggtcactataaatacaaagagcatagcttgggctacaggaaagaaggcattcatatgtataaatgtgtgtgtatatatacactgttttttcttttttaagagactgggtctccctctgtcacccaggctggagcacagtggtacgatcatagctcactgcagcctccaaaggtgcggctgaagtgatcctcctacctcaacctccctagtagctgggattaaagatacacaccaccacatggctaagaaggcattctagccctgagtggtggtgacacaggttatatacttgaagtatacacacacacatatatatgtatacacccatatgtaaatataacacaaaaaactatgtatttcactctatgtatatatatttaccattttaaccgtttttaagtgtacaattcaatggcattaaatacattgttgtgcaaccaacatcaccatccatctccaggacttttttggcatcccaaacggaaactccatagccattaaacaacaatttctcatttccccttccctccagccatgggcaaccaccatgctactttctgactctatgaatttcactactctggctacctcatataagtggaactgtactgtactggtccttttatgtctgacttatttcacttagcataatgtttttgaaggttcgtctatgttgtagtatgtgtcagaatttgctaccttttttaggctgaaaaataaacgattcacaatatattttt

SEQ ID NO: 4642 - DNA, 1847 bp, Homo sapiens
gcgtgcgccctggggcccaagttggggcgcgccgtggctagaacacggagagcggcgggcagtgcagccaatgggaggcggcgctgcctagcggctggtaggcggtgcctgcgcgggtgttaggttagcgcgaggcgtgacctagttgacaggctctgaggtgctgctgtggcggcgtccgcggggctgaggcgggtgggagccggagccgagcgcgggctgagggaggagggcggcgactggagagcggcgagcggcgagcagcgcaggacgcagagcctctttcactttttccctgctgagtgccccctcccacccctcccactccacacacaccctgtttgcccgtgagcctggggaacttgcagcttaaagccagccacccccacggcaacatgtaccccagcaacaagaagaaaaaggtgtggagagaggagaaagaacgtttattgaagatgaccttagaagagagacgcaaagaatacctaagagactatattcccctgaacagcattctatcatggaaggaggagatgaagggcaagggccaaaatgatgaagaaaatattcaggaaacatcccaggtgaagaaaagtttgactgaaaaagtttctctctatagaggtgacatcacattgctagaggtagatgctatagtcaatgccgcaaatgccagtcttcttggaggaggaggtgtggatggctgtattcatagagcagccggcccctgtttgctagctgaatgtcgtaacctgaatggctgtgatactggacatgcaaaaatcacatgtggctatgaccttcctgcaaaatatgtcatccatactgtagggccaatagccagggccatattaatggttcccacaaggaagaccttgcaaattgctataaatcatctctgaagctcgtgaaagaaaataacatccgatcagttgcatttccctgcatctcaacaggcatttatggctttcccaacgagcctgctgcagtcattgccctcaacaccattaaggaatggcttgccaagaatcaccatgaggtggatcggatcattttctgtgtcttcttagaagttgacttcaaaatctacaaaaagaaaatgaatgagtttttctccgtagacgataataatgaagaagaagaggatgttgaaatgaaagaagattcagatgagaacggtccagaggagaagcaaagtgtggaagaaatggaagagcagagccaagatgcagatggtgtcaacactgtcactgtgcccggccctgcttcagaagaggcagttgaagactgtaaagatgaagattttgcaaaggatgaaaatattacaaaaggcggtgaagtgacagatcattctgtgcgtgaccaagatcatcccgatggacaagagaatgattcaacgaagaatgaaataaaaattgaaacagaatcgcagagctcatatatggaaacagaagaactttcatcaaaccaagaagatgccgtgattgtggagcaaccagaagtgattccattaacagaggaccaagaagaaaaagaaggtgaaaaagctccaggcgaggacacacctaggatgcctgggaaaagtgaaggctccagtgacctagaaaatactccaggtcctgatgcaggggcacaagatgaagcgaaggaacaaagaaatggaactaaatgacaatcctcagcatcgcaaggcctctcctggctctgggggagctcgggaagatagcagcacacgctgtggaggagggtgggggtggggggaaggcaagtcccatggaaggacggggaatcctttactctaatttctccagctgcattttgttccgtttatctgcagaaaaagaaag

SEQ ID NO: 4643 - DNA, 2987 bp, Homo sapiens
gtttgtcaccttgtactcagcccctgtgtacagaacatggcacagaagccatttttgtggcagcggtggggattcggccgtctcaccatgctgctgcacagtcttagagtccttgctcagagccgggctgtcgtttatttaacatccaacggtcggtgtgtgtgtgtgtgtgttgtgggggagtgggggggtgttctcttcctacaatgctgcctcccaggttcctgcagcagccacacatatctctgggtggctggggaggaggaccaggtcagaatgcagtaggacaaggttcttttctccaggaggcccagagaggatgatgggtcaggtaaaaggccctgcacttaactctctgcccctgggagacttatttctcctctggggacttgtttctgcatccacaggtgaaagtggtttaaatgagaagctcttaaactttcttggtttggcagcagagttatttttctagacaaagtataatgtgaaagtttaaatggatgaaaatgaactgaggaggcccccttggtgggagccactggggtgtgtgtggcagttgggggatcctgcatggtctcccttcattcccctaatgcctcttgaggcccctcagtgtgggccattaaaaggcccctagaccagcagatcccttctacagatctgcttattgaaaaacctgctctgtgccaggcagtgcctggaattctaaacctgaagctcccaaatgctgctctccggggcctggctcacattatcaagtcacttgggaagcttaacaaataacgtgggtttgtggtagctccttgacaggtgtgcttatccgtgtcgcctgtcttggcttccgatgcaaagccagcttgggaacccctggcctcatctccttcagagtcttcgtttgaccttggtggggcatgaggacctgctggcccttgttaaagccagtgaaggtggtgaccctcccgggccatctgttaagttgccctgttgatggggttgggaggagttagtagagaagcagggcttcttttgcttagcagcccctgcccagacccatctgtgtgtctctcagacaagcctgtgccggaggagtcggagggccctggcagccctcccccctacaagatgatccagaccattgggttgtcggtgggtgccgctgtggcctacatcattgccgtgctgggcctcatgttctactgcaagaagcgctgcaaagccaagcggctgcagaagcagcccgagggcgaggagccagagatggaatgcctcaacggtgggcctttgcagaacgggcagccctcagcagagatccaagaagaagtggccttgaccagcttgggctccggccccgcggccaccaacaaacgccacagcacaagtgataagatgcacttcccacggtctagcctgcagcccatcaccacgctgggtatgttgccttgactacagctgcccctgcctaactataagtcacccgctgtgtcttgaggctgggtacgggctagtgttctgaagtccctgaaacctagaatgttagaggtggagggaagcataggtagagatctagcccagtgtggccccagagcctgttattcactgcccttcgtgcagattttgtcattcctgtgtactacctgtagtattatttacttgatgttttatttaaattgactctttaaaaaaaaaaactaagttaccattgttctaggaaaaaatatgagaaatcatgggtttgtcatagttacgttttttcctagcatacgttaagacatgtttaccatgagccaccaaaaattctcatgcgagtcaccctttggaaaatgctgaatattagtcccacccttttattttgttgctgcagacactgaagcctaaggagggagggggtcacagcagaaccgggtctcgtgcccagcccaggtgggtgggtccccactgtgggagaggctaggcccctcccccaggtcaggagctgtctcggcctgggtgaaggtggctggctgactcagactgtacccacagggaagagtgagtttggggaggtgttcctggcaaaggctcagggcttggaggagggagtggcagagaccctggtacttgtgaagagcctgcagagcaaggatgagcagcagcagctggacttccggagggagttggagatgtttgggaagctgaaccacgccaacgtggtgcggctcctggggctgtgccgggaggctgagccccactacatggtgctggaatatgtggatctggtatgctgttggcaggggacgtgggggtctcgggtagggagggcagtgtcctacaaaggtgggagtcagtggttggagcaccgtgaaaaccttgtctcgtgcagtctcagccgagacctcacctgcctgctgttacactttgcccaccttatgatgctcagcttctgccttccctgctcttggatgcctgctttccctttatcagcacccagtctttccatctgtatctcaggggcgttggtcctaagtttttctgggacttctcactgtcacactgcagggatgccttccaggtcatcttctctgactcttgttttctttggtttgttattttttcctccccaaaagcttgtccccacttgagaataaatatatcagaacccactttgcctccctccttcctagcaccacttgtgacatgagtgttaccccagccaccagccttctcctctccactcagggtgtcattcccagagctgcgccttcctcttcattccccagctggtccttgccctcaccccatggtcctcaaactgctgcttctcaaatccctagttctggggcaagagcgggcaggagtcctatcagtctttccattaacaagtacttacgcggctgggcacagtggctcacacttgtaatcccagcactttgggagactgaggcaggaggatcgcctgaggccaggagtccgagaccagcctgggcaacatagcaagactctgtctctac

SEQ ID NO: 4644 - DNA, 2253 bp, Homo sapiens
aattttgcaacgacgggcgcggaggaggaggttcccggaagccacgcgcagctggagcagcggcgaccgcagctggaggcccggagcgcctgcggggctggcagaggcgagggaggttgcgggtagggagggcggactgcgcgcgccccctgcgtcccgcgcacctcggggccggtccatgctcccgacggctgcgggcttcagcatctggggccaggttggggcagcaagggaggcgccgcgatgccagacgaaaatatcttcctgttcgtgcccaacctcatcggtgagtgctgcccacggccccgggccgaacgagagggcgaggggccttggcgggctccctgatcctgccctgtctccccgcgtcccgttccaaggttatgcccggattgtcttcgccatcatttctttctacttcatgccctgctgccccctcacggcctcctccttctacctgctcagcggcctgctggacgctttcgatggacacgctgctcgcgctcttaatcaaggaacccggtttggggccatgctggacatgctgacggaccgctgctccaccatgtgcctgttggtcaacctggccctgctgtaccctggagccacgctgttcttccaaatcagcatgagtttggatgtggccagtcactggctgcacctccacaggtctgctgcgattctgggggcctgggccacttggagacattacagtggggtgggctgagcctagatggaagggtgtctgggatggcactaggcatcctggaagggctcctttttagctctgctttgtagaaagaccccaggcaaacctgcctctctttaaagcttcagtcatgtttacagttgcattaagcaattcttaggactcttctggctgggtattctaggattccatataggtgacagcttataggaaggggcatgggagctttcaaatgtggcatttgaatcctgactctgcccccaaataggtaactgtggctttcggcaggatactggtccttagccgtgcccagttttccatctgtacaataggtgttaacatgaggattggatgcatggtagtggtcatgaaaccttgtgggttcccctgttttctccccaagttctgtggtccgaggcagtgagagtcacaagatgatcgacttgtccgggaatccggtgcttcggatctactacacctcgaggcctgctctgttcaccttgtgtgctgggaatgagctcttctactacctcctctacctgttccatttctctgagggacctttagttggctctgtgggactgttccggatgggcctctgggtcactgcccccatcgccttgctgaagtcgctcatcagcgtcatccacctgatcacggccgcccgcaacatggctgccctggacgcagcagaccgcgccaagaagaagtgacgctggagccccgggtcctggctgcccacctgccctgggagtcttgctgtgccacacagctccccaccccctgctaggaggtcccagtctcacgccttcctcatgtgttgttctacctgctgggatgggggtcagcctctctttggtgacgtcacgttctctgggatcctgaggacccgggcctcaaatcagggaggatacgcgggaggccccctccatccaggcggtgctcctggggtgccgggaccgggcagtgtcacaccctgcctgctcagtcctggggtccgagatgctagggacgcttgagtgagggaggtggtgtgagggccaggtttcctgaaaggcgggagtcagacctccgcccccagccagagcaagcttggggcaccatgcccaggagggaagaagccatccacagccttccctgtcaccggctcctctgtcctgcctaccctggtcctggcgggacttcactatttgacttggtttcctttcagatattcttggctcagggcctgggttgagggagcttagggaaggacgtccgtctgggtgcttttcctccagtttgctggctggcttctccgtctacccacagtgacctcacagagaggccctcctgccacccatgctcatgtggtgtccccaccgcccacttgtttgatgtcactgactgtctacatgtatttatattcttgatattttctaccctcactagaatgtaaactccatgaaggcacagacttttcttgttctcttctgtatccctagagtaagaccaacttgaacctggcatatagtagctgcttaataaatactcgtctgtcaatg

SEQ ID NO: 4645 - DNA, 3001 bp, Homo sapiens
aaaaaaaaaaaaaaaaaaaaaaaacagagaagtcaaatggttttttggaatatggtggccctccgtacccatcggttccacatgtgtggtttcagccaactatgtattgaaaataaaattgcatccttacaaatatgcagactttttttccttgtcattgttcccttaacaatacagtgtaacagctatttacgtagcatttacattgtattaggtactatgagtcatcctggagttgctgtaaaacttaaacgtaaaacttgaaatgaggatgatttaaagtatagaggaggatgtgcataggttatatgcaaatactctcccattttatattagggacttgagcatccacggattttggtatccgtgggggtcctggacccaacctgccacggatacgcagggacgactgtatttggcatagaggcctttctaatgcacttaccaaggacacctgcagcaggctgtgatccctgagacgagcgtgagtttagtgagggcagagtttttgttctggttctcagctgtgtcccagcacctgggattgtccctggcacacagtagctgcttagaaaagatttgatgagagggtgaccatacatgaggggaaattttcctcagtatcaaaacatgttgaaactcacacacttccaagatgacgtattctcaggtctcctgccgttgccgttctctgccgtatgtgatggtgttctgtcttaccagaggctgtggccctgagaaagatcacgtctacctgcagctgcaccacctacctccagagcagctggccacgcgcctgcctggcatttcagagacagccatgatcttcgctggcgtggacgtcacgaaggagccgatccctgtcctccccaccgtgcattataacatgggcggcattcccaccaactacaaggggcaggtgatggtgctggctcctcccccacagctggaaagaaggctgggacgacggggcccacctcgcagttgtctctttagatcttacaggaaaagatagatgtttccttcaagaaagtactgtattgttttctagattgcactttaaatttctattaccggaggatggagggggcttaataatttattcctccttagtaaattgtcagagatacatcatttgcagctttttccattttgtaattactttcctatatgatcttgtgttatttctaatgatcttacacatcaagggatctttataattcattcctttgagtggtttgtggttcacacagagcttgtcagtcacttaggctccttgttgggcgaggtgggtggaagctgttgctctccctgcgtagacgaagaggtgaacggggtagaacagtctggaacatcagtctcccctgctgatgttcctccacctgccgtgctcctgggtctgagccggagcacaggtggtgagggccccgggaacatgggacacgggggacagtcgcagatgctgacattggaggtcctctgacctgcttgtaacagcaggtgctcaggggcagaggggaaactgggggataccttcggaagcttccctctgaagaagagtagctatggtccttacttccctcttagatacggtctttacttccctctctttttttttcttggagatgcagtctcactctgttgcttcggctggagagcagtggtgcgatctcagctcactgcaacctctgcctcccaggttcaagtgatttttccgcctcagcctccctagtagctgggattacaggcacccgccattatgccccgctaatttttgtatttttagtagagatggggtttcaccgtgttagccagacaggtcttgaacccctgacctcaggtgatcacccacctcagcctcccaaagtgctgagattacaggcgtgagccaccacgcctggcctacttccctctctctgacctgcagcacagacaccctgttggggaaggtgggctggtggaggcatgggcaccttgacatttcacctgaaatcttcctttccacaggtcctgaggcacgtgaatggccaggatcagattgtgcccggcctgtacgcctgtggggaggccgcctgtgcctcggtacatggtgccaaccgcctcggggcaaactcgctcttggacctggttgcctttggtcgggcatgtgccccgagcatcgaagagtcatgcaggcctggagataaagtccctccaattaaaccaaacgctggggaagaatctgtcatgaatcttgacaaattgagatttgctgatggaagcataagaacatcggaactgcgactcagcatgcagaagtcaatgcaaaatcatgctgccgtgttccgtgtgggaagcgtgttgcaagaaggttgtgggaaaatcagcaagctctatggagacctaaagcacctgaagacgttcgaccggggaatggtctggaacacggacctggtggagaccctggagctgcagaacctgatgctgtgtgcgctgcagaccatctacggagcagaggcacggaaggagtcacggggcgcgcatgccagggaagactacaaggtgcggattgatgagtacgattactccaagcccatccaggggcaacagaagaagccctttgaggagcactggaggaagcacaccctgtcctatgtggacgttggcactgggaaggtcactctggaatatagacccgtgatcgacaaaactttgaacgaggctgactgtgccaccgtcccgccagccattcgctcctactgatgagacaagatgtggtgatgacagaatcagcttttgtaattatgtataatagctcatgcatgtgtccatgtcataactgtcttcatacgcttctgcactctggggaagaaggagtacattgaagggagattggcacctagtggctgggagcttgccaggaacccagtggccagggagcgtggcacttacctttgtcccttgcttcattcttgtgagatgataaaactgggcacagctcttaaataaaatataaatgaac

SEQ ID NO: 4646 - DNA, 3398 bp, Homo sapiens
aaaatcttagtggcggctatccaagaggtacagaatgaaatggcccgttaatttggacagacacacaagaacaggctttttgaaacctgaaaaaggcattaactgaagcccctgctttagccctccctaatatctcaaagccgtttcacctgtttgtccatgaaagccagggagttgctaaaggggtgcttactcagaccttaggaccctggagacgcccagtagcctatttatctaagaaactggatcctgagacctctggatggccaagttgtctgcgagccaagcagtagccgctacagcaagcctagtccaagaggctgataagttaactctgggccaaaatttaacccttaaggctcctcatgccatagagactttacttcaagtgcttctggcgaatggatgtcaaatgctcgcatcttgcaatatcagagtttactgttagatcagtaaactgactttctcttccacacggtgtttaaatccagctactatccatgactgtcaggaactgttggaaactaccgaaactggcccatccgatcttcaagatgtgcccctagagaaggcggacgccaccgtgttcacagacggtagcagctttctcgagcagggagtacgaaaggccggtgcagctgttaccacggagacagatgtgttgtgggctcaggctttaccagcaaacacctcagcgcaaaaagctgaattgatcgccctcactcaggctctccgatggggtaaggatattaacgttaacactgacagcaggtacgcctttgctacggtgcatgtacatggagccatctgccaggagcgcaggctactcacctcagcagaaaaggctatcaaaaacaagaatcccccgtcttcaaagcctaacagatcaagcagctctctggggaacaacctgcgaccaggtaaatgccaaacaaggtcctaaacccagcccaggccaccgtctccgaagaaacttgccaggagagaagtgggaaattgactttacaaaagtaaaaccacaccaggctgggtacaaataccttctagtactagtagacaccttctctggatggactgaggcatttgctaccaaaaacgaaaccgccaacttggtagttaagtttttactcaatgaaatcatccctcgatatgggctgcctgctgccatagggtctgataatggaccggccttcacctcgtctatagttctgtcggtcagtaaggcgttaaacattcaatagaagctccattgtgcctatcgagcccagagctctgggcaggtagaacgcatgaaccacaccctaaaaaacactcttacaaaattaatcttagaaacttgtgtaaattgggtaagtctccttcctttagccctacttagagtaaggtgcaccccttactaggctaggttctcaccttttgaaatcatgtatgggagggtgccgcctatcttgcctaagctaagagatgcccaattggcagaaatatcacaaaagaatttattacagtacctacagtctccccaacaggtacaagatatcatcctgccacttgttcaaggaacccatccgaatccaattcctgaccagacagggtcctgccattcgttccagccaggagacctagtgtttgttaaaaagttccagaaagaagcactcactcctgcttagaaaagacctcacaccatcatcctcacaacgccaatggctctgaaggtggacggcattcctgcttagattcatcactcccgcatcaaaaaggccaacagagcccaactagaaacatgggtccccaggcctgggtcaggcccctttaaaactgcacctaagtcaggtgaagccattagattaattctttttatctacctcacttgtttgtttttgcctgttatgtcctttgcgccttcctactcctttctcctcacctctttcacaacaggatgtgtatttgcaaacaccacttggagggccagtacctccaaggaagtctcctttgcagttgatttatgtgtactgttcccagagccagcccgtacccgcgaagagcaacacaatctgccggtcccaaaagcaggaagtgtcaaccttgcagcaggatttggacactccaggagccaaactggatgtggaagctccaaagttgcagaaaaaggactccaaaatgttgacttttacctctgtcctgggaatcaccctgacactagctgtcgagatacttaccagtttttctgccctgattggacatgtgtaactttagccacctactctgggggatcaaccagatcttcattccataactcgtgcttctcgtcctaaattatgtactagaaaaaattgtaatcctcttactataactgtccatgaccctaattcaactcagtagtattatggcatgtcatgggaattaagattttatatcccaggatttgatgttgggactatgttcaccatccaaaaaatcctggtctcatggagcccacccaagccaatcgggcctttaactgatctaggtgaccctatgttccagaaaccccctaacaaagttgatttaactgttcctccaccattcttagtcataaaagatacactccaaaagttcgagaaaatctagataggcgccaacaggaacgagaaaacaacatcccctggtatcaaagcatgttcaactggaacccctggctaactactttaatcactgggttagctggacctctcctcatcatactattaagtttaatttttgggccttgtatatgaaattggtttcttaattttgtaaaagaatgcatagcttctgtcaaacttatgtatcttaatactcaatataacccccttgttataattgaggaatcaacgatttgattccccaaaaacacaagtggggaatgtaatgcccaaccttgtttttactaaccctgtttttagactctcccttttcctttaattacccagccttgtttccacctgaattgactctcccttagctaagagagccagacagactccatcttggctctttcactggcagccgcttcctcaaggacttaacttgtgcaagctgactcccagcacatccaagaatgcaattaactgataagatactgtggcaagctatatctgcaattcccaggaattcatctgattgataacgcccaaagcccccggtctatcaccttgtaatagtcttaaagcccctgcacctggaactgtttaatttcctgtaaccatttatccttttaactttttgcctactttatttctgtaaaattgttttaactagaccctcccctcccctttctaaaccaaagtataaaagaaaatctagccccttcttcgggccgagagaattttgagcgttagccgtctctcggtcgccagctaataaatggactcttaattcgt

SEQ ID NO: 4647 - DNA, 3818 bp, Homo sapiens
aagtgttagctcgaagaaaatatgccttgctacctagttctagtagttccagtgagaatgacctcagcagtgaatcctcttctagctcatcaactgaaggagaagaagatttgtttgtttctgccagtgaaaaccaccaaaacaatccagctgttccctcaggaagtattgatgaagatgttgtggtgatagaagcttcctccactccccaggttactgccaatgaagaaattaatgttacctcaactgacagtgaagtggagattgtaacagttggagaaagctatcggtctcgttcaacccttggacactccagatctcattggagccagggttcaagttctcatgcaagtcggccacaggagccacggaaccgcagtaggatttctactgttatacagcccttgaggcagaatgcagcagaagttgtggaccttaccgttgatgaagatgaacctactgtagtaccaaccacttctgcaagaatggaatcacaagctactagcgcttccattaacaattcaaatccatctacctctgagcaggcctctgatactgcttcagctgtcaccagtagccaaccttccacagtgtcagagacttcagctactcttacaagcaatagtaccactggcacttctataggagatgactcaaggagaactacatctagtgctgtaacggaaactggccctcctgcaatgccaaggttaccttcctgctgtccccagcactcaccatgtggagggtcgtcacagaaccaccatgcattaggacatcctcatacaagttgctttcagcagcatggtcaccattttcaacatcatcaccaccaccaccatactccccacccagctgtcccagtttctccttcctttagtgatcctgcttgccctgtggaaagacctccacaagtacaagcaccttgtggagcaaatagtagttctggtaccagctatcatgaacagcaggcattgccagtagacctgagcaacagtggtatcagaagtcatggaagtggcagttttcatggagcatctgcatttgacccctgctgccctgtttcttcctcccgagctgcaatctttggccatcaggccgctgctgctgccccaagtcaacctttatcatcaatagatggctatggatcaagcatggttgcgcagccccagccccagccccctccacagccctctctctcatcatgtcgacattacatgccacccccttatgcctctttgacaaggccacttcatcatcaagcttctgcctgcccgcattctcatggaaacccccctcctcagactcagcctccgcctcaagtggattatgttattcctcatcctgtacatgctttccattctcaaatatcttctcatgcaacatctcatcctgtggcacccccaccaccaactcacttagccagtacagctgcaccaatccctcagcatcttcctcctacacaccagccaatttcgcaccatattccagccacagcacctccagcacagagactgcatcctcatgaagtgatgcagaggatggaagttcaaaggaggaggatgatgcagcatccaactggtctttttgtgttctgtgtttccaggcgggcacatgaacgccccccaccccatccacataggatgcacccaaactatggtcatgggcatcatattcatgtgcctcagactatgtcctcacatcctcgacaggctccagagaggtctgcctgggaactgggaattgaagctggagtgactgcagctacttatacacctggtgcattgcatcctcacttggcccattatcacgcacctcctcgacttcatcacttacaattaggagctcttcctttaatggttcctgatatggcaggctatcctcacatccgttacatttcatcaggattggatggaacatcattcagaggtcctttcaggggcaattttgaggaactgattcatttggaagaaagattaggcaatgtcaatcgtggagcatcccaggggacaattgaaagatgtacatatccacataaatacaaaaaggtaacaactgattggttctcacagaggaaactgcactgcaaacaagatggggaagaagggactgaggaagacacagaggaaaaatgtactatctgtttgtctattttagaggaaggtgaagatgtgagacgtcttccatgtatgcaccttttccaccaagtgtgtgttgaccaatggttgattaccaataagaagtgccccatatgcagagtggacattgaggcccagctgccaagtgaaagttgacaccatgtttcagaactcttgccctccctctcattcccatccttcctggtactgcagtcaaccaaagatggcatgacttacctgcgcagatttggaagcattgaacttagagtgctggctctgctatatggtacaactaatgctagacctacagtttatgtatacagttgattttgatgtatttataaaagcttttttttctagatttgacatttttctgtatcattttactgtatttttgcatggttccttgtattgcatttctttgcacatattatgggcttgtgaccctaaacttgcaggcaaggttagctgctttagtaagtagaattttgtggtctttttgttttttacatagtaccaagccttgataattatgaattttttatccattactaacctttaatttaatcaatcatgtactttagtttaatgtataaagatcctctagaaaatgataatattgtgtattaagacattccttaattaggacaaaatggctgctgtatatttactatatggagttctgagttaaataccatccttaatactgggaacagaatacaacccatataaatcagatgcaggtggtagtcacatcaccagagtgatcagtataaattttcttggtgtatccttttcctttcaacacagtgcagataagagttgaatattgatatcatacatttagactgctgttctgattgcatttatctttttcctacatcatttagaattttatttccctgattcagtttttgctgctgtgaaacagctctgatgaacactaaatattaatttcaattagctagattgtacatacttgcagatttaacaaaattttagggaaattgaaaaagacatgtagaatttgttgtcttctgctaagcacgaaaagttaagatatctgcttacattgattttgtagacacattaagtcaagatttggaatttaagtcactggcaggtatctgtgcattcatagaacttataaaggtcccaggatcacttttaagggatttttattagtttaaaggtaaataaagtcagctgaatctacatgtctcttgttttatttctctctaaacttgaaaacagtaaatctgcagatactgtgaggcacaaattatactgtcaacctactgttgctatggttatatactcccacttcatacattaccaagagtcgatcactgatttaaaatttttaatttctatagttaagatttactgcataatatagaatataaagttaagttaacatactaacatttctcctttggaggaagttttaatctacttcaggatgcatattattatcaagatactttcatatacaggatagcctaattttatttgtttaaatatgcttaatatgccccagattgcaaatgcatccagtcagtaatatcactgtctgtatgtggaggacatgttcccatggatcatatgtgaagatgtcaataagcttgcattaagccacctgctttgtaagtggattgattaataaataacttatatttc

SEQ ID NO: 4648 - DNA, 1920 bp, Homo sapiens
caagtgcaggcatggtccccatctagcagccagggcccacgaatgacatgggtcacacaaggctgactaaaatcagaggggcctgtgtgtaggttgagagaaagtccatgagaaatagaggaacagagagagatagccagacagcaaacaccctcatccagtctgcaaacaccctcatccagtctgcaaacaccctcatccagtcagccctctcatttcacccagactcctgcaaaagcttccagaatggtcttccctgttatacagcccttgccactatccctgcccatcctccacactgggccaatttgccccgtaagaacatagatttcttcaagcccatgcttccatgtcttcaatggcttcctattactcttagcacaaaagcccagagccttcatgctgtctaatgtaggctgctgtggcctgagttcccctgaagggagagccctaggcaaggctcccaggcagaggatttgtttgggaagtgattctaggagcaggactggggtactgggaggagtgacacagagaaggacagaaggctgatgccgggagaaattcttgatagggtcacccatgtgggcgactggagacctcctgaggagtcttcaaggagcgtcttcagaatgttcctctacagggaggagagagggaggcctgtaaccactgctcctgtcccccatggccttgccccagtggacattaattatctgtatttccatgcatagaatatagaactgctgggcgcctcagctggagcccagagcaggggcaagagatacagaatgcacaaaatcaccccagaacctctcctaagtcactcgtaaagtgcacccagggcctacttagtccttttttatgtagcatcctgcagaacacttgcctcagtccctgtaactctccatcagccaaggcttccctgaccttcagttgattcatctatttcttcctgaagaagtcaacagagcaacggccaccgacttgcctaacgccagaacattgtgtttcatttgtctgtcaattgttcatcaattcctggataattcccattcttttcatacatttcacttaagctttgaatgtttctggcactgagtaatttacttcttcagtgatccagccagcatttgccctgacacttagagttgaaatgccatcaggctacctgcatttgatgcaattccactgtactgctagtattgtttaaaaattttcaattgcaagcaacagaaacagaaactatctgtcttaaacaaaatagaagattcattggatgaaaactagagcaggtcagaggatggaaggaagaacaaaatctacagaatttggaaggacaggagcagaccattaccaacatcaggaatatatggtttgccctttcagggctctgcctgcacctggcttagctccacacactttgattcctagtgtctctgattaaagtttcacatactcagtagacagaatagcttgggttagtgactcttcttgaactaatcagtgaggctatggtatcaggaatggggatgggtaacagagacacaaaccctaatgggaagcctctggccaaacagccacctgaatttgtgctcattgtatacagtcaatcgcttgctactgcacacacactcttcttctcatacaaacaaaaagaactctccttatctgctatgaacccagccatcccaaggaaaaaggcaaatgcacttgcctcttccccagtgagagccacacacagcatctccaccttctgcatgctgaagttatgtcacaggaggagggcctcagcacacgatcaatttttcttttggtccattggcagcttctgtctcagaatttttgtgtgtgtatatttgtagaaaataaagaggtacggtcaaggctacagccactactgaccattgctgccaccatcag

SEQ ID NO: 4649 - DNA, 3433 bp, Homo sapiens
agtcgccatgacgaccaggaggtccgctagtcaacggctcgtcaacggctgcggggacaagtccgttgaggctgccaggcgagtcaggcctttctggacctcgcctgactcggctgggctgtgcctgaaattgacccagctccactaggaattatgaagaaacaaggactccgggaagaggtgcacgaactgcaggcgcggtggttccccagcagaaccactctgcatcggggaattgaaaacaaggaattccccaaccaaacaggggcacaggctgtgtttgcagctcctgtaaaagctccatacccagagccgtgtctcccagctcccagccgtctttgtggcaattctacattggttacatttagtaacactttttgaaaatgatcatcatttctctcacctctcatctttggaacgggagatgactttttgcattgagacggttaggtttcttcttctaacgaattaatttgtggtttaagaatagccagaccgagaggtgacagcatgctggcagtcctcagagcccttgcttgctctcggcacctcccctgcctgggctcccgctttggtggcatttgaggagcccttcagtcccccactgcactgtgggagcccctttctgggctggccaaggccggagcccactccctcagcttgcagggaggtgtggagggagagacacgagcgggaaccggggctgtgtgctgcacttgcgggccatctggagttccgggtgggcgtgggcttggtgggccccgcactcagagcagccagccagccctgctggccccgggcaatgggggacttagcacctgggccagtggctgcggagggtgtactgagtcccccagcagtgctggcccaccggcgctgcgctcgatttctcgctgggccttggctgccttcccacggggcagggctcgggacctgcagcccgccatgcctgagcctcctacccaatccatgggctcctgtgcggcctgagcctccccgacgagcaccaccccctgctccacggcgcccagtcccatcgaccacgcaagggctgaggaatgcgagcgcccggcacaggactggcaggcagctccacctgcagccccagtgcaggatccactaggtgaagccagctgggctcctgagtctggtggggacgtggagagtctttatgtctagctcagggattgtaaatacaccaatcagcaccctgtgtttagctcaaggtttgtgagtgcaccagtcaacactctgtatctagctgctctggtgagggcgtggagagtctttatgtctagctcaaggattgtaaatacaccaatcagcactctgtgtctagctcaaggattgtaaatacaccaatcggcactctgtatctagctcaaggtttgtaaacacaccaatcagcaccccgtgtttagctcaaggtttgtgagtgcaccagtcgacactctgtatctagctgccctgatggggacgtggagaacctttgtatctagctcagggattgtaaacgcaccaatcagcgccctgacgaaacaggccactcggctctaccaatcagcaggatgtaggtggggccagataagagaataaaagcgggctgcccgagccagcattggcaacccgctcgggtccccttccacactgtggaagctttgttctttcgctctttgcaataaatcttgctactgctcactctttgggtccacgctgcttttgtgagctgtaacactcaccatgaagatctgcagcttcactcctgagcccagcgagaccacgagcccaccgggaggaacgaacaactccagacacgccaccttaagagctgtaacactcaccgcgagggtccaccgcttcattcttgaagtcagtgagaccaagaacccaccaattccggacacaagactatgagggactttattattcttacttcaagaccattattgaagcaccttcatttttgggaggactgtggatgattatgaatgacaggcttactgaatatcctcttgtaattaatgcagtaaaacgcttccatatttatccagagaattctggagtccaaggaagaccaagatcaaggcgccagcagatttggtgtctggtgaaggctgctctccgcttccaagatggtgccttgatgttgcatcttcctgaaggagaggaacactgtgtcctcacatggcagacagtaggagagtaatcatagcctcctggtatcgcacattcatgggaatagtgaatttatttggactagaaactaagacctgctggaatgtcaccagaatagaacctcttaatgaagttcaaagctgtgaaggattgcgagatcctgcttgcttttatgttggtgtaatctttattttaaatggactaatgatgggattgttcttcatatatggaacatacctaagtggtactgaactgggaggtcttattacagtactgtgcttctttttcaaccatggagaggccacctgtgtgatgtggacaccacctctccgtgaaagtttttcctatcctttccttgtacttcagatgtatgttttaactttgattctcaggacctcaagcaatgatagaaggcccttcattgcactctgtctttccaatgttgcttttatgcttccctggcaatttgctcagtttatactttttacacagatagcatcattatttcccatgtatgttgtgggatacattgaaccaagcaaatttcagaagatcatttatatgaacatgatttcagttacccttagtttcattttgatgtttggaaattcaatgtacttatcttcttattattcttcatctttgttaatgacatgggcaataattctaaagagaaatgaaattcaaaaactgggagtatctaaactcaactgctggctaattcaaggtagtgcctggtggtgtggaacaatcattttgaaatttctgacatctaaaatcttaggcgtttcagaccatatttgcctgagtgatcttatagcagccggaaccttaaggtatacagattttgatactttaaaatacacctgttctcccgaatttgacttcatggaaaaagcgactctgctgatatacacaaagacattattgcttccagttgttatggtgattacatgttttatctttaaaaagactgttggtgatatttcgcgtgttttagctacaaacgtttatctaagatgctgtctttgcaggtgccatgcctacaatggcaagtgtcaagctgtctacacctcatcccattgtgaatcatccacattacgaagatgcagacttgaggcctggttgcagcatgcttgaaatctgggatgtggaagacccttccaatgcagctaaccctcccttatgtagcgtcctccttgagccgagattgtgccactgcactccagcctgggcgacaaatcaagaccccgtctcc

SEQ ID NO: 4650 - DNA, 2210 bp, Homo sapiens
agaaactctgcgctgtgggcctccgtgtcccttctgctcccgctgtctgagcctcgcgatgtaccccgcgctcctcgtcccctcttcgtctccctcttcggtgttcggggtcccagaaaccgggttctcgcagtggcccggaccacagggaaattgccgagtcatccagtcgggatcagcgagcctgcagggtccccttcctgggcgagcctcctggcacccagcaatcggaggcccggacacccccgccagggacccagcgacccaggaagtccccaccccctctcagagcgaccctgggcctcgggctgacaggtctcctccactaaaaaggctgctgcccctctatcctacaccccgagattcctttcactcgggaatctcctaatggcacccattgtctttttggtaagtaaacggtggcgtgagaaattctgatggggttagctcagtcattggagagtgtgtctcagtttaggatcgatggttccagacctaacttggcagtagcactgctttattcagatggcccatcctattccgaatgttaatttgctctgttcttcatattcagatttttatgccgaatttctagctcctgcgtctctattgcgggccctaaaagtcgctgtttcactaagctttggaacctgactccgggaaatctcattctttcgtcccaagatctcagccagaaagagagttccgcgcggcggcgtcttcaagcgcgcgggctgggagcgcgggttctgatcctgggtcgccccggccgagctccctcagggccacggggaagaggaacctgagcagctctgaggggcgagtctctgaagatggggctcccccttctcccgtcaggaccctgccccaaggagaagacgccttagttaaaaatgttttctcctgctcttcagagcacttgggatgaggttcctgatgggtcttgggagcgaactaagatgtcactccaggcgctcaggaccatcgctctcattttcatattttggggctgagagcggttacaaaggactgaaaaataccgcagtctttgaggggctcagtttggaggacgagccggggttgaggggggttgacgccttcttggcttcttggagtggactggcaggtaaggaaacacaaactccgtttccccttgcaggcagaactgcaggacctgggatggaaaattggacagtcaaagagtaacaatatttatgtagaggtgggttgcgtgcattaaaaattgttatccctacagataagtgtaggaagggaccagggcactgctgttcaccaccagctttgcagcatatgtaactttgataacagtgtatagtgcataaaaattcattcctgttcacaaatatttgatcacaaccagttacaggtttctttgttccttctccacttccactgcttcacttgactagccctataggaaaaaagaatcattcttaaatatgatattgtttcagttgatcgccagcccgcccgttccccaccccctgaaagtagctgggacaacaggtgtgcaccacgtgctgggctcatttttgtatttttagtagagatggggtttcgccatattggccaggcagctctcgaactccagaactcaagtgatccgcctgcctgggcctccctacacctccctgctgggattacaggcatgagccaccccacttggccatcatttgtattttgaatttaaatattttgtagtcatcactcttcaaagattctgggttttgctgcatgtgcatgatgggattcaggacatgctactccaaagtataacatcttggggtattgaatattttatgctaaaggaatatgagtaaaccacagaagcaggaaggtcactgtcaccctccccctgcccttcctccctgaagtccagtataagactcttatgtgagaggtgccctctctgtacccagaggaaaggtgcatccttgattctgaagacacagggacacagagaagagcctgaacgcagaggcctggctacctttcccccactttgttactgttagatcatacttttattgacttatcatacttctccatgactattcattcttgaataaacctactgttaaaaaaacaaaaacaaaaactgaggtttagctgtttccatgggccttcatttcctttggaaggcgttcctgtcatgtaaaatttacattaaataaatctgtatgctcttc

SEQ ID NO: 4651 - DNA, 3526 bp, Homo sapiens
ttcgggtcttcatctcaaatcctgatgggtccccagcttccagagtccttgtccactcccaagaccaaaaagtgtacacctcagctgaggggttggccactctgaccatcaacacagatgcaaatctggacaagctccccatcgaggtgaaaactgaggaatctcttcagccagaggagcaggcttcagccaagatgacagcttggccttacttgactcaggatgggtcaggaaacttcctacacatcgaagtaaagacattgggcacagaggttggcagcagcatccagctgagcctcaacacaaggcatcaggaccctaaaaccaaggacaagattactcacttcaccatcctggtcctgagtaagggccagaccgtgagtgccaaacatcagtcaaaaagccaggggagtgtctacacatcagccattattgatgtgacttcagcgatgctgccctccttccgcattctggccttttatttacttcccagaggagcaagccaagaccctgagttggtggctgattccatatggattgatgtgaatgacagatgcatagggatgctgaaagttggcttgaagaatgatagattcttccagtctttggagcccaacagccaagtcgaactgaaggtgacaggtgatgcagaagccacagtggggctggtggctgtggacaaggctgtctatgtcttgaacagcaaacacaagctcactcagaagaagactagccctgcccccaggaccctcctcccagccgccatcgccgctccctgaagaggctggagacaaaaaggaatgcagtgaacaagtttaagacagagctggagcaaaagtgctgtgaggctgggctccgggagagcccagtggggctgtcttgtgaggagaggacctggcatgtccgccatggtccagcctgtgtggctgctttcctggactgctgccatctgtctgagaccctgactcgggaggctcgagaggatcaattgcatctgtggacaacggatgaagaagaggacttcgatgacctcttcttggatgacatgcctgtgcggaccttgttccccgagagttggctctggaggaagttcactctgccaaagagtaaatcgggcatctcccattaccccatctctgtgaaggtgccagattccatcaccacgtggcagtttgtggtggtcagcctcaaggctggacaaggtctctgtgtctcggacccctttgagctgacagttatgaaatcgttctttgtggaccttaagttgccctcctccgtgatcaggaatgagcaggtccagatccaagccatgttgtacaatttcagggatcgccaggccaaggtccgagtggagttcccccacaaggagacactgtgcagtgcgtcaaagccaggagcaccatcccaccaggcaggggttcagatccagcaaacgtcctatagcatcgtcctggaaccccaaggtcagacccagacaaaactggtgccaagacaggagttcttgaacatggtacccgacacggaggcggaagtgtttatcagtgttcaaggctacactcagatgctgacccaccggagttcagacggcacctaccacacctccaaggggaacccaggaagcacttggctcacaagctatgtgttccgcgtctttgccctggcctactctatgatgacgacccaagtgcttagcctgtcctctctctgtgacatggccaactggatcatcatcgacaggcaggcagaggatgggcacttcctggagaagggccctgtggtcatgacatccatgcaggatggctaccaaggctccgaggaggatgtatccctcacagctcttgtcctaatagccctgaatgagggaaaggagttgtgcagacagaagaatttgatggccagcatcgagagagcccgtggcttcctggagagaaaacttcccgacattcagacaacctttgccgtagccatagcctcctatgcactggcccttgccaacagctcccaagccaacgactgcctggacagctttgccagccctagtgggtgtgggatgcttcttaatcaacctcagtcatggagtggggagggggtgatctcaaatccagcaatgtgttattcatcacttagtgtttcctgagcatccactgtgtatcacctcctgagctcagaccctgtgagaccaagacaaaacccactggccagtggatgagcagaatctgggctccctgtacaccattgaggccacagcctatgggctcatgcagaagctggagctgggccggtacaatgagacacacgccatagccaagtggctactagagaagcaggagctgggaggaggcttcaggtccacccagaccacggtggtggcccttgaagctctgacccgcttccgcgaagctgtccccttcaagggcatccaggatctccacgtccagatcagagcccccaagacagccctgaatgtgaattggtacattgatcacagcaatgcctaccaacagcggtcagcaaagttccttgcccaggacgacctagagatcaaagccagtggcaacgggagaggcaccatctcgatcctgacaatgtatcacaagtccccagagtcccgggaggacaactgcaacctgtaccacctgaatgcgactctccacagtgccctagaagaaaataaaaagggaggtgagacttttcggctccggatggaaacaaggttccagaacaattgagaggccacaatgactatcatggaggtctccctgctcacgggcttctaccccaaccaggatgacctcaaacagctcacgaatgatgtggagaggtacgcctttcagtacaaaaccaagacaagtaccagcgacagcactgttgtcctctacctggaaaagctctcccatgagaagaacacggtgctgggctttcgggttcacaggatgctgcaggcggagttcctgcaggccgccctggtcaccatctacgactactacgagccttgacagtgcccatccctgcagaagcccagtggccaattgaggcaggaggagctccagacaacagcatgtgaggcaggcgtggattttgtgtacaagacaaagctggaatctgtggaggtctctgcctccaacccttacgtctattacaacacgcagctcgaagacatcattaagagtggtacggaccctgccacacccctggccatgaagaaattcgtctcccatgccacttgccatgactccctggggttgcaagaacaggaatcgtacctcatcatgggccagacgtcagacctgtggagaatcaaatctgattacagctatgttctgggcaaggagacgttcctcatcctttggccagcagatggagatgccagcaagaaagaattgcgggaccaactggaggaatttttggaatatatgcgcacccacggctgccagtcctgagcctcttctgctttcagggaggtgtcatcaggcagctctgggccactgggtttaaccccaaataaagagcacaggatatgacaccc

SEQ ID NO: 4652 - DNA, 3315 bp, Homo sapiens
gcttccgggtgagccccccccgctcttacgcggtctgtgggagaccggagcgggagacagcggtgacaggagcagcggccgggagcccttagggaggcagacagagcctgcagccaatgccccaggagccctcggttccaaccaactgatgcccctgtgcccactggcccacgccatgcagccccagtccgttctgcacagcggctacttccacccactacttcgggcctggcagacagccaccaccaccctcaatgcctccaacctcatctaccccatctttgtcacgccctgggcttggccaggcagggaagccagacactggatcccatcctcctcccaccatctccacttccatatttctttcctgcttcccaaccatccctctcagtcgcccccgcaccactggcccttcccacagctaccaatccatatcccacccccgctcttgcagggatgttcctgatgacatacagcctatcaccagcctcccaggagtggccaggtatggtgtgaagcggctggaagagatgctgaggcccttggtggaagagggcctacgctgtgtcttgatctttggcgtccccagcagagttcccaaggacgagcggggttccgcagctgactccgaggagtccccagctattgaggcaatccatctgttgaggaagaccttccccaacctcctggtggcctgtgatgtctgcctgtgtccctacacctcccatggtcactgcgggctcctgagtgaaaacggagcattccgggctgaggagagccgccagcggctggctgaggtggcattggcgtatgccaaggcaggatgtcaggtggtagccccgtcggacatgatggatggacgcgtggaagccatcaaagaggccctgatggcacatggacttggcaacagggtatcggtgatgagctacagtgccaaatttgcttcctgtttctatggccctttccgggatgcagctaagtcaagcccagcttttggggaccgccgctgctaccagctgccccctggagcacgaggcctggctctccgagctgtggaccgggatgtacgggaaggagctgacatgctcatggtgaagccgggaatgctctacctggacatcgtgcgggaggtaaaggataagcaccctgacctccctctcgccgtgtaccacgtctctggagagtttgccatgctgtggcatggagcccaggccggggcatttgatctcaaggctgccgtactggaggccatgactgccttccgcagagcaggtgctgacatcatcatcacctactacacaccgcagctgctgcagtggctgaaggaggaatgatggagacagtgccaggcccaagaactagaactttaaaacgttcccggggcctcagacaagtgaaaaccaaagtaaatgctgcttttagaactgtgccctcatgccctcttcctgctcacatgctagcggggcccagcagccctgggtggttttgccagcatgctaactcttgtaactcgcagctgcatcctatgagctctcccaagcttccccgcccctcccctgggtcagccgtgaggcccacctttgccaccctcagctctttcctctggtgtggcttcagcttgaaagcaacctggagtcgggggcacagcctttggggcctggctgggagagggtcttggagcattaggggaagaagagagcagtgggatcttggggcctgagaagccttggaacgcttctggcagcagagctgggtgtgggaatgaggcctagatcgatatccctgggttagagttgaaatttgccgcaattccactggaaggcatttcccacgaggccagaggttgccaggctgcctgaggtctcctattctactctgaaccataaacccagagaagaattactcattaaccagcataaatactgcctgaggatcaaaactcagaggcaaagagggagttcctgactgctagaggtgccaccaccacaaacactttttattcaggagatactttttgagaatctctgctctgttcctaggttcagtgctgggtcctgggaatacagcaggacagacctcagcttatctcttcatagaaattatacaaagagaattggggagacagctaagaagaaaacaaagaaataaagcagttacaaattgtgataagtgctttgaaggaaagaaggggtctgagacaacaacagggaaggggcctctcttgaaacagtagttgggaaggaggcagacatgcaccagtgatgtggtgacaggtgctctgaaggaggtcaccaggacctgacctctttgaaggatcagaaaatacttccctgaaggactgacatttgagcctagacctgaagggtgagccatcaagctaagacaattggggaagagcattccagggagagggaggagttgtgcaaaggccctggggctccttctagctggaggaatgcaaggctagcttgtctggagcactgagaggatggcctgaactgagtggagagagacagaccaggaccaaaccatgcagaggtcaagggccacattcaccttttcagagtgactcaatcaaatttgtagtttgtaaaagtattttaacagctctgcggcaaagtgcaaatgaaaagtcttgatggcatggactggagcggggacagtggggatggagaaaggggaatggattgtggatgtgtttagaaggtagattcgatgtgaaggatgaatctggcttgaccttctgggtggctgatgggccatttactgagatggggcagcctggaagaggaacagaagcagggtcggggtggagggagaatactaaacttagcttgagacattttgcaataaggaagctatatctagagtgcttatgtgactcacctaaggccactcaacaagtttgtggcagaactggattagaactgcacagaaaacagccaagctgggatttgaacccatgtagtccaactccaaggcctctgcccctaaccactgtgccataccacctcccaataatcaacagcaaaattataggtctaacaatgttttatagacacccctccatttatgtgatgggtttgcatcctgataaacccatcataagttgaaaatatgatcataagttgaaaatatgatcataagtcaaaaatgtatttaatatacctaacctaccaaacatcatagcttagcctagcctgccttaaacatgctcagaacacttacattagcctacagtgggcaaaactatccaacacaaaatctatattgtaataaagttataaagaattttgaataaaaattcaatatttg

SEQ ID NO: 4653 - DNA, 2322 bp, Homo sapiens
aagtggccttggccttctgttatttcagatccagcagatggggagactgaacaaagtggtatcctgggcccaccagtttttctacactcacccactctggtttgaaccgttcactggcttccagaacatttgagcccaactatgtcaaagctgtgtgtagccacaggggtgaggtgttcttgggagagctgctcttcctgagaacaaagggctcaggctatgatgtggggaggaggcctggacctgtgtcctatgcctgggcagctgaagttcccaccctgcttatcaaggtgcctcctctgggaaccccctagtctctatttgacccaaccaacttcttcacttgcagaacctcaagccctaatatgtatgacttcttcctccagtggattgtttattcaggatgataacatggagaagcttgaggaaattattgaaaaataccctcgtgccttccctttctggattgggccctttcaggcatttttctgtatctatgacccagactatgcaaagacacttctgagcagaacagatcccaagtcccagtacctgcagaaattctcacctccacttcttggaaaaggactagcggctctagacggacccaagtggttccagcatcgtcgcctactaactcctggattccattttaacatcctgaaagcatacattgaggtgatggctcattctgtgaaaatgatgctggataagtgggagaagatttgcagcactcaggacacaagcgtggaggtctatgagcacatcaactcgatgtctctggatatagtcatgaaatgcgctttcagcaaggagaccaactgccagacaaacagcacccatgatccttatgcaaaagccatatttgaactcagcaaaatcatatttcaccgcttgtacagtttgttgtatcacagtgacataattttcaaactcagccctcagggctaccgcttccagaagttaagccgagtgttgaatcagtacacagatacaataatccaggaaagaaagaaatccctccaggctggggtaaagcaggataacactccgaagaggaagtaccaggattttctggatattgtcctttctgccaaggatgaaagtggtagcagcttctcagatattgatgtacactctgaagtgagcacattcctgttggcaggacatgacaccttggcagcaagcatctcctggatcctttactgcctggctctgaaccctgagcatcaagagagatgccgggaggaggtcaggggcatcctgggggatgggtcttctatcacttgggaccagctgggtgagatgtcgtacaccacaatgtgcatcaaggagacgtgccgattgattcctgcagtcccgtccatttccagagatctcagcaagccacttaccttcccagatggatgcacattgcctgcagggatcaccgtggttcttagtatttggggtcttcaccacaaccctgctgtctggaaaaacccaaaggtctttgaccccttgaggttctctcaggagaattctgatcagagacacccctatgcctacttaccattctcagctggatcaaggaactgcattgggcaggagtttgccatgattgagttaaaggtaaccattgccttgattctgctccacttcagagtgactccagaccccaccaggcctcttactttccccaaccattttatcctcaagcccaagaatgggatgtatttgcacctgaagaaactctctgaatgttagatctcagggtacaatgattaaacgtactttgtttttcgaagttaaatttacagctaatgatccaagcagatagaaagggatcaatgtatggtgggaggattggaggttggtgggataggggtctctgtgaagagatccaaaatcatttctaggtacacagtgtgtcagctagatctgtttctatataactttgggagattttcagatcttttctgttaaactttcactactattaatgctgtatacaccaatagactttcatatattttctgttgtttttaaaatagttttcagaattatgcaagtaataagtgcatgtatgctcactgtcaaaaattcccaacactagaaaatcatgtagaataaaaattttaaatctcacttcacttagccgacattccatgccctgaccaatcctactgcttttcctaaaaacagaataatttggtgtgcattctttcagactttttcctatacattttatatgtagaaatgtagcaatgtatttgtatagatgtgatcattcctatattgttattgatttttttcacttaataaaaattcaccttattcctt

SEQ ID NO: 4654 - DNA, 4478 bp, Homo sapiens
gttgcactttgcaaaggaggagtcagccctcatgtgcaagaagctcactaagcttgccaaggagaatgacagcatgaaggaggagctgctgaagtaccgctcgctctatggggacctggacagcgcgctgtcagccgaggagctggccgatgccccccactcgcgggagaccgagctgaaggtgcacctgaagctggtggaggaggaagccaacctgctgagccgccgcatcgtggagctggaggtggagaaccgaggcctgcgggctgagatggacgacatgaaggatcatggaggtggctgtgggggtcctgaggcacgcctggccttctccgcgctgggtggcggagagtgcggggagagcttggcagagctgcggcgacacctgcagtttgtcgaagaggaggccgagctgctgcggcgctcctctgccgagctcgaggaccagaacaagctgctgctgaacgagctggccaagttccgctcggagcacgagctggacgtggcgctgtcggaggacagttgttctgtgctcagcgaaccttcacaggaggagctggcggccgccaagctgcagatcggcgagctcagcggcaaggtcaagaagctgcagtacgagaaccgcgtgctcctctccaacctccagcgctgtgacctcgcctcctgccagagtacgcggcccatgctggagacggacgccgaggccggggactctgcccagtgtgtgcctgctcccctgggcgagacacacgagtcccatgcggtccgactctgcagagccagggaggccgaggtgctgcctgggctgagagagcaggccgccctggtcagtaaggccatcgatgtcctggtggctgatgccaatggcttcacggctggcctccggctgtgtctggacaacgagtgtgctgacttccggctgcatgaggcccccgacaacagcgagggccccagggacaccaagctcatccatgccatcctggtgcgcctgagcgtgctgcagcaggagctgaatgccttcacgcggaaggcagatgcagtcctcgggtgctctgtcaaggaacagcaggagtccttctcatcactgccccccttgggctcccaggggctctctaaggagattcttctggcaaaagaccttggctcagactttcagccacctgacttcagggacctgccggaatgggagcccaggatccgagaggctttccgcactggtgacttggactctaagcccgaccccagccggagcttcaggccttaccgagctgaagacaatgattcctatgcctctgagatcaaggagctgcagctggtgctggctgaggcccacgacagcctccggggcttgcaagagcagctctcccaggagcggcagctacgaaaggaggaggccgacaatttcaaccagaaaatggtccagctgaaggaggaccagcagagggcgctcctgaggcgggagtttgagctgcagagtctgagcctccagcggaggctggagcagaaattctggagccaggagaagaacatgctggtgcaggagtcccagcaattcaagcacaacttcctgctgctcttcatgaagctcaggtggttcctcaagcgctggcggcagggcaaggttttgcccagcgaaggggatgacttcctcgaggtgaacagcatgaaggtgctgtacttgctgatggaggaagaggagataaacgctcagcattctgataacaaggcctgcacgggggacagctggacccagaacacgcccaatgagtacatcaagacactggccgacatgaaggtgacgctgaaggagctgtgctggctgctccgggatgaacgccgtggtctgacggagcttcagcaacagtttgccaaggccaaggctacctgggagacagagcgggcagagctcaagggccatacctcccagatggagctgaagacagggaagggggccggggagcgggcagggcccgactggaaggcagccctacagcgggagcgtgaggagcagcagcacctcctagctgagtcctacagcgctgtcatggagctgactcggcagctgcagatcagtgagcgcaactggagccaggaaaagctgcagctggtggagcggctgcagggtgagaagcagcaggtggagcagcaggtgaaggagctgcagaaccgcctaagccagctgcagaaggctgccgacccctgggtcctgaagcactcggagctggagaagcaggacaacagctggaaggagacacgcagtgagaagatccacgacaaggaggctgtttccgaagttgagcttggaggaaatggtttaaagagaaccaaatctgtttcttccatgtctgagtttgaaagtttgctcgactgttccccttaccttgctggcggagatgcccggggcaagaagctgcctaacaaccctgcctttggctttgtgagctccgagccaggggatccagagaaagacaccaaggagaagcctgggctctcgtcgagggactgcaaccacctgggtgccctggcctgccaggaccccccagggaggcagatgcagcgcagctacacggctcctgacaagacgggcatccgagtctactatagtcccccggtggcccggcgcctcggagtccctgtggttcatgacaaagagggcaagatcattatcgagcccggcttcctcttcaccacagccaagcccaaagagtcggccgaggctgatgggctggctgagagctcctatggtcggtggctctgcaacttctcacggcagcgcctggacggaggctcagcgggcagcccctcggcggccgggcctggcttcccagcggccctgcatgactttgagatgtcaggcaacatgagtgatgacatgaaggagatcaccaactgtgtgcgccaggccatgcgctccggctcactggagaggaaagtgaagagcacatccagccagacggtgggcctggccagtgtgggcacacagaccatccgcacggtcagcgtgggcctgcagaccgacccaccccgcagcagcctccatggcaaggcctggtcaccccgcagctcttcgctcgtgtctgtgcgcagcaagcagatctcctcctccctggacaaggtccattcgcgcatcgagcggccctgctgctcccccaagtatggctcaccaaagctccagaggcggtctgtgtccaagctggacagcagcaaggaccgcagcctgtggaacctgcaccagggcaagcagaacggctcggcctgggcccgctccaccaccacgcgggacagccctgtattgagaaacatcaacgatggactctccagcctcttcagtgtggtggagcactcagggagcacggagtctgtctggaaactaggcatgtctgagacgcgggccaagcccgagcctcccaagtacggcattgtgcaggaattcttccgtaatgcgtgtggccgggcaccgagccccacctcatcagcaggagaggagggcaccaagaagccagagcccctctccccagccagctaccatcagccagagggtgtggccaggatcctgaacaagaaggcagccaagttgggcagcagtgaggaggtcagactcaccatgctcccccaggtggggaaggatggtgtcctccgggacggagatggagccgtggtccttcccaatgaggacgctgtttgtgactgtagtacccagtctctcacctcctgcttcgcccgatcgtcccgctctgccatccgccactctccttccaagtgcaggctgcacccttcagagtccagctggggtggggaggagagggcactcccccccagcgagtgacagagcagccaagctccccgcctcaaccagcccagcccctggatagcagaagggaaccagcagagacgagacgaggctgaacaccagggtcatgccagtcccgccagccgcctcctccatgccccagtgactggtgtgggcagagcaggcagccagtggagctgtgggccagttccgctcttggatgctgctgctctcacccatgaggtcaggggggccctccaaggttatctccaggtgaggggattcacatcaggccacaagccaccagaggccttctgccacctcccagagcgacagccagggaggctgcgtactcagcctcggggagaaatccccgtgggacctgagccccaagacctacggaccactcagccttaccatcgtaccgtccaggattgtccttgccatctttgttgtctcagccagaccttggttttcagtaaagccccagtttctacttcctgcatgccactgtgcaaggccactcatcactgttcctgcagaagcctctggacgtggggctggatggggttgaaaatgttacatgtaaatattggtttggttcggtttttagcattttacttggtaactggttgttttcttttttggggtggggggattggtttgtaaaaattctctactcttttgg

SEQ ID NO: 4655 - DNA, 2854 bp, Homo sapiens
agaactcacatcggatgattcaggcatggctctgctaacactttattaaaagcatggattaattttacttccaagtttatttttactgcaccgtcccatttgtggaaacaactagcttactcagcttttttttccttttataaaggaaagaacagaaaagtaaaaggaggaaagaaaacaagaggtgagtgaggcaactgaaaactgttcttggacctgcggtgctatagagcaggctcttctaggttggcagttgccatggaatctggacccaaaatgttggcccccgtttgcctggtggaaaataacaatgagcagctattggtgaaccagcaagctatacagattcttgaaaagatttctcagccagtggtggtggtggccattgtaggactgtaccgtacagggaaatcctacttgatgaaccatctggcaggacagaatcatggcttccctctgggctccacggtgcagtctgaaaccaagggcatctggatgtggtgcgtgccccacccatccaagccaaaccacaccctggtccttctggacaccgaaggtctgggcgatgtggaaaagggtgaccctaagaatgactcctggatctttgccctggctgtgctcctgtgcagcacctttgtctacaacagcatgagcaccatcaaccaccaggccctggagcagctgcattatgtgacggagctcacagaactaattaaggcaaagtcctccccaaggcctgatggagtagaagattccacagagtttgtgagtttcttcccagactttctttggacagtacgggatttcactctggagctgaagttgaacggtcaccctatcacagaagatgaatacctggagaatgccttgaagctgattcaaggcaataatcccagagttcaaacatccaattttcccagggagtgcatcaggcgtttctttccaaaacggaagtgtttcgtctttgaccggccaacaaatgacaaagaccttctagccaatattgagaaggtgtcagaaaagcaactggatcccaaattccaggaacaaacaaacattttctgttcttacatcttcactcatgcaagaaccaagaccctcagggagggaatcacagtcactgggaatcgtctgggaactctggcagtgacttatgtagaggccatcaacagtggagcagtgccttgtctggagaatgcagtgataactctggcccagcgtgagaactcagcggccgtgcagagggcagctgactactacagccagcagatggcccagcgagtgaagctccccacagacacgctccaggagctgctggacatgcatgcggcctgtgagagggaagccattgcaatcttcatggagcactccttcaaggatgaaaatcaggaattccagaagaagttcatggaaaccacaatgaataagaagggggatttcttgctgcagaatgaagagtcatctgttcaatactgccaggctaaactcaatgagctctcaaagggactaatggaaagtatctcagcaggaagtttctctgttcctggagggcacaagctctacatggaaacaaaggaaaggattgaacaggactattggcaagttcccaggaaaggagtaaaggcaaaagaggtcttccagaggttcctggagtcacagatggtgatagaggaatccatcttgcagtcagataaagccctcactgatagagagaaggcagtagcagtggatcgggccaagaaggaggcagctgagaaggaacaggaacttttaaaacagaaattacaggagcagcagcaacagatggaggctcaagataagagtcgcaaggaaaacatagcccaactgaaggagaagctgcagatggagagagaacacctactgagagagcagattatgatgttggagcacacgcagaaggtccaaaatgattggcttcatgaaggatttaagaagaagtatgaggagatgaatgcagagataagtcaatttaaacgtatgattgatactacaaaaaatgatgatactccctggattgcacgaaccttggacaaccttgccgatgagctaactgcaatattgtctgctcctgctaaattaattggtcatggtgtcaaaggtgtgagctcactctttaaaaagcataagctccccttttaaggatattatagattgtacatatatgctttggactatttttgatctgtatgtttttcattttcattcagcaagtttttttttttttcagagtcttactctgttgcccaggctggagtacagtggtgcaatctcagctcactgcaacctctgcctcctgggttcaagagattcacctgcctcagccccctagtagctgggattataggtgtacaccaccacacccagctaatttttgtatttttagtagagatggggtttcactatgttggccaggctggtctcgaactcttgacctcaaatgatccacccgcctcggcctcccaaagtgctgggtttacaggcatgagccaccatgcccagccctcatttagcaaagttttaaacatgaaaagtgcttattagaggatatcagtgcctggcccacatgagagaacagatccatacacactttgaaaaactttgttcacttttaggaaatataattttgaaaaatcatttacatacaagaggtccactgaggcattgcttttaatggcaaaatattgcaatgtacttgaatgtccttcacattagattggtaagataaattttagtatgtgcatgtactggaatattatatagccagtaaacaaattgacaatgaagctctatttgtaccagtaaagaatggtcttgaagagacattgtaaaatga

SEQ ID NO: 4656 - DNA, 3284 bp, Homo sapiens
attaagctgagaccagaaggctgagtggtggtgacctacaagaagaagaagggaaggtcataacagtaatgacttggagtggagaggccctgcaggttggagaagttcagtgtggctcaccatggagtgtcagagtgagggagatgactgctgagctccgagaggtgaacagagcccctgaattaattaaaaggatttacggtatatcttatgactctacaggagccttgggatatagataaaaatgaatgccatttcccatccagtactgaagtgttaaagttagaagacatttgctaagtcaaatcacttcaggtatgttgaagaaagtacgcacatcttatcttctgaacattttgatggaattaaccacaaacttcatgcaagaacagtaaaaggaaagatactattcaagtccagtacatcataatgcagaattctgtatcagtaccaccaaaagatgaagcaagcaaggagaagcttaggagaaaaaataatggaacaagtatcaggaaagctggactccattccatacctgcctccaaccagctgtggaaccccaggcaaagttattttgcccctgagcctcagttttctcattgaaaaatcgagaatgactaggtgttcctttcaggctctaaaaaggtgaatcaaacatcccttctggaacaatacagagtaggaaaggtttgcagaataagagtcagtttaggaccattgcaccaaaaattgtgcccaaagtcctaacgtccagaatgctgccatgtcattcaccatcacgctctgatcaggtgaatctgggaccctccatcaactccaagctgctggggatgtccacccagaactatgccctgatgcaggttgctggccaggaggggacattttctcttgttgctctgccacatgttgcctcagctcagccaattcagaaacccagaatgtccctacctgaaaacctgaaacttcctattcctagatatcaaccccctagaaatagcaaagcatcaagaaagaaacccatcctgatctttcctaagagtggctgtagcaaagctcctgcccaaacccaaatgtgtcctcagatgtccccttccccacctcaccaccctgaactcctgtacaaacccagtccatttgaagaagtaccatcactagagcaagccccagccagcattagcacagctgcgctgaccaatggaagtgaccatggggacttgagaccaccagtgaccaacacccatggcagtctgaaccctcctgctaccccagcatcatccacaccagaggagcctgccaagcaggacctcacagctctttcagggaaagcacactttgtaagcaagataacatctagtaaaccttctgctgttgccagtgaaaaatttaaagaacaagttgatcttgcaaaaaccatgaccaatttatcaccaaccattcttggcaatgcagttcagttgatctcttcagtccccaaagggaaactgccaatcccaccctactcaagaatgaagacaatggaggtttacaaaatcaaatcagatgctaacattgcaggtttttctttaccaggacctaaggccgactgtgataagataccctccaccacagaaggctttaatgcagccaccaaggtggcaagcaggctacctgttccacaagtgtcacagcagagtgcctgtgaaagtgccttttgtccacccaccaaacttgatcttaaccacaaaacaaagctgaacagtggagcagcaaagagaaaaggaagaaaacggaaggtaccagatgaaattttggcatttcagggaaaaaggaggaaatatatcattaataagtgtagagatggtaaagaaagagtaaaaaatgatccccaagaattcagagaccaaaagctggggaccctgaaaaaataccgtagcattatgcccaaacctatcatggtcatacccactttggcctccctggcttctccaactacactacagtcccagatgcttgggggcctaggacaggatgttttgttaaataattcactcactcctaaatatcttggctgtaagcaagacaacagctcttcccctaagcccagctccgtgttcagaaatggattctctggcattaagaagccttggcacagatgtcacgtctgcaaccaccacttccagttcaaacagcaccttcgagaccacatgaatacacacaccaacagacgcccttacagttgtcggatttgtcgcaagtcctatgtacgtcctggcagcctgagcacacacatgaaacttcatcatggtgagaaccgtctgaagaaactcatgtgttgtgagttttgtgcaaaagtgtttggccacatccgagtctattttggccatctgaaagaagtgcatagggttgtgatcagcactgagcctgcgcccagtgaactgcagccaggagacataccaaagaacagagacatgagtgtgcgaggcatggagggatcattggagagggaaaacaagtccaacctggaagaagacttccttctaaaccaggcagacgaagtcaaattacaaatcaaatgtggtcgttgtcagattactgctcagtcttttgcggaaataaaatttcatttacttggtgttcatggagaggaaattgagggcaggctacaagaagggaccttcccaggaagcaaggggactcaggaagagttggtgcagcacgctagccccgactggaaaaggcatcctgagagagggaagccggagaaggttcattcctcctccgaggaatcacatgcatgtccaagactgaaaaggcagctccaccttcatcagaatggcgtggaaatgctcatggaaaatgaaggaccccagtcaggaaccaacaagccaagggaaacctgccagggccctgagtgtcctggcctccacacgtttctcttgtggtcccattcaggctttaactgcctgctttgtgcagagatgctgggacggaaagaggacctcctccaccactggaagcaccagcataactgtgaggacccttccaaactgtgggctattttaaatacggtctccaaccagggagtgatcgaactttccagtgaagctgagaaatgagaccccaaggcagcctggggttaaggagagagctctgccgccaccttccttcagagcttcgtgctttatggtggtgcttagtcacaaagatcaaacaacaggattggtgtgagtgaacagaaatgatttttgtacatggttttattttcttaacgaaataaaatataagctctcgaagcatatttttct

SEQ ID NO: 4657 - DNA, 2474 bp, Homo sapiens
ttaaaaactaggcttggcctcttgcctatagtggccaccactcctcaagccccagccagcaccatgagcggccgagttggagacctgagccccaaacaggcagagaccctggccaaggttcaagcaattctcctgcctcagcctcctgagtagctgggattacagttccgagaaaacgtccaggatgtgcttcctgccctgcccaaccctgatgattatttccttctacgctggctccgagctcggaattttgacttgcagaagtcggaggctttgctccgcaagtacatggagttccggaagaccatggatattgaccatacccttgattggcagcccccagaggtgatccagaagtacatgcctgggggcctgtgtggctatgaccgtgatggctgccccgtgtggtatgacatcactgggccacttgatcccaaggggttgctcttctcagtcaccaagcaggacctgctcaagaccaagatgagggactgtgagcgcatcctgcatgagtgtgacctgcagacagagaggctagggaagaagattgagaccatcgtgatgatatttgactgtgagggcctgggactgaaacacttctggaaacctctggtagaagtgtaccaggagttctttggcctccttgaagagaattacccagagaccctgaagttcatgctcatcgtgaaagctaccaaactgttccctgtgggctacaacctcatgaagccattcctgagtgaggacactcgcaggaaaattattgtgttgggaaataactggaaggaaggtttgctgaaactcatcagtcctgaggaactgcctgcccagtttgggggcaccctgactgacccagatgggaaccccaaatgtttaaccaagattaactatggcggggagatccccaagtccatgtacgtgcgggaccaggtgaagactcagtacgagcactcggtgcagatcaaccgcggctcatcacaccaagtggaatacgagatcctatttccaggctgcgttctcaggtggcagttctcatctgacggtgcggacatcggcttcggagttttcctgaagaccaagatgggggagcgacagcgggcaggggagatgacagaggttctacccagccagcgctataacgcccacatggtgcccgaggatgggaacctcacctgctcagaggccggcgtctatgtggaaagtgagtctgggaagtcttgctgtcatctgcccgtgattatatgcagccatgagctacagaactcacactcaaactcgcaagtgatggcataccaaatggtacgaaaatgcaagctaagtaggcctttacccctccctgccagtaactaatttttgtctgtgtgagtaactggcctgtgtgtaagaggactcaccccctacgtggtctccagttaattctttttcccatttgggctcctgaccgccttgccatgctgcttctaagaggggttatctatactcagagggcctagggcagaccaaggaagggaaagaagttttggaggtttgtttgtttgttttttggagacagggctttgctttgtggcccaggctggagtgcagtggtgcgatcatagctcactgcaaccttgagctcttgggctcaagtgattctcccctctcagcctcctgagtggctgggaccgcaggtgcacatcaccatgcctgggtttttttctttctttctttctttctttttttttttggtagagatgaggtattgttacattgcccaggctggtctcgaattcctgacctcgggcgatcctcctaccttggcctcccagtgctgggattacatgtgtgagccaccactcctggtctgggctttttttttttttttttaggagaatgtaaggcatttgtttagtgtttactgagcatctactgcatgccaagctctgctcaggaggccaagagagcaggataggagtgagccctgcacctggggtttggcctggctggggagccctagcctcaggaagcaggactgccctggaccccaggaggcccctgctcaacctgcgacaagactgaaaggctccccagatgcactgtgacggtcaagggagagaaatgggtgacctgggatcctggtggcttcagatctcattgggggaaggagcaagggaccccaggggtcagaggcattgggggggtagggctgtcagagggcacccagcagagtgactcacaggctatgaggaaagaagtctcctcttgcttgtatcttcaggatgccaagacctgcagcccaggcctggggtggtggttatcccggagcggccttaccaggtgcacagctggccaagggaggcttggtcatgggcagagagggcaggaggaaggcccttgctccaccaccccctctcccaagggagtcctatgcccagaacttaccaagtagcaagactagagcaaccagcagaagacccttgggggcagccatcatg

SEQ ID NO: 4658 - DNA, 2211 bp, Homo sapiens
atgttgtgagaaagtgctgggctagctgactcggatcatctcctagagtttaggagaaataacaatcacaaagtttgaatttgcaaaacctttaggctttgctggcaggagagaaaataccacttttggatcataaaatggatatggaatacatgggctcaggtaaactgggccaaatattgaagcagatttggagacaaaaccagatgctaaagcaggcactcttgggtgatgacctttgtgagggggctggtggggccacttggatggccactgtggtctttctgggtcaggaactcagcagtgcccttcaccagctgctggagcacacctcaggcaccctgcgttccacctgccagcagctgcatgtgctgcttgacaaagagaatcaatgtgtctcgagaaaaggtatcttgatgtgctgagtgatgttactggcccccaagtgtcttgttatattacagcaccatcatatgttctacaacaactagaatgccggataataaatcacatgagttctttaatagtgggtgataatgaagagttagttagcaacgtcataactattgaatgctcagataaggaaaagagagttccatttccaataggcattgcaattccatttactgcacgttacagaggaaattacagagatatcatggtgaaagtgtgtgacataaaccttcaatcaagttacctaaacccaaattcactagaaggaatgaagggaggttataaggggacctgtgcttcagtaaaagtttacaaattgggtatcttttctgttgtgtcttgtttaaagaaagagtcgttcacagtaacaaagaaaggcctcgctcttaagtcaagcatggattcccgaatatccttaaattaccctccaggagtttttacctctccagtgctggtgcagttaaagatccaaccagttgacccagctctggtggcacatttaaaagcacagcaagatactttctactcagtccaatccacaagccctctgattcacattcagcacccatcaacttatccttttcagaagccagtcactttgtttttaccttgttctccataccttgataaaaacaaccttggttctgagatagatcataaaagaagagcaagtgccacaataaataggattacaccttcgtatttcaaccggacaaaaattgcctccataagaaaacctaggaaaaatgccagtgaatgtttgaaattactgggattcagaagccaagacagtggttggtgtgggcttgatgatgttgtgaaaaccatacagagcggcttggtatcagttgaattgtatgaacatttggagaggtttattgtacttcacctctcttccaccatggacaatagtcatttggttacttttgtgaaatctttagaggaagccatgctcagcaccactgcctgcatagtactgtctcaccagaaggacaatccacatagaatagctgttttagtggtgccttccaaagatttaagccaggtgcttaaggacctgcacttggaagggtttggaggacctccagagccatctcgtcatttccaagttcgagaaggagaacaacttcttttaagatttactggaaacatatttgcttcaagcaacgggaaggattatggaaaagactacacacttatttttcacttgcaaagaaaacctaggctggaactccaaatcaaagaagtggacgaatttggaaactatagttgccctcattacaaaggcaccattgtcgtttataaagtacctaaaggaaagatagtccccaacttgaatcaatctctcgtaattaatgaaaaccattctcagttgccaatttgcaaattaccattgaaattgccaaagcataagaaattaatcaaccatccacagagtaccaaaagagtttctaaggatcctgtagaagccctttgggataacttgctccattggctggctgaggagctctcagaagaaaatgctgagtctctttcctcaactctccctctgcgccgtagcaccattcagctcatcaaactcaagaaccctgatgatctcacagaacagatccacgagtttctttgcttctggaaaaaatcgcttccaactttcaccgacaaacttcgcctcctggctcgacatctccgcaagattggcaggagtgatcttgcagaagaactcaaattcaagtgggaaaataaagtgttcactgaacc

SEQ ID NO: 4659 - DNA, 2513 bp, Homo sapiens
gaactgtggcagcatctggccttctctgcatgaccagcgtggtgtggcatggatcacacagctgggctggcttgccctcctgtgcttctgtgcccagttgataacagcagtctttggggaaggaaatcacagttatcttacccgccaaggccacgctcccttcccatttggggctcaccagagcctgatcatcctgccctgctggcctcctgcctatcccattcatttcatcccactcctgcccccagtttaggctcacggcatcacctgccttgcactctgatggcaccgtgctccacctcccacctccttcccatcttcctacatcagagcctgattgagccactgccctgcacctgcctttaaggcccgtgtttcctacagaatagcattcagtctctgacgtgatattcaaagccctccatagcctgggtgcattcataagaatggaagctccatgagggcaggggccacacttgtctggtcattcatacccagacctagcatggtggctgtcatagaaggtgttcaacaaatatgtttttaaaataacaaatggtgcacatctatttttctaacctcattgacgtctaattttcttcatccatcttattctagtgattccaaacaaactccttttctgagtatttcaggcactgtagagcctccatgcctttactcatgctggtcccttatcctgaaagccttttccagccttcactgtgtacagacatcctactgcattgggggctggctcacatacccactttccccaagcagaataactgtttttttcccctctcacttacagatctagttaggtggtattttatttttcctctttcttggccatttgttagtctttctgtacatgaggttgtaaactctaaaggtaaggacattatcttcacctctagtcatttagacaggggcagcaaactttttctgtaaaggacgagatgataactatttaaggcattgggggcttgcagtctctcctgctgctgtgtcatgaaagcagccgtgggggatatgtaaatagtacgtgattgagcaagtgcagcaccagtgcacagtctcatcatcgtctctgtgggtacctgagtggaggtgaatcgactggcctgaatgaaaagagtgaaagttcccatgtggttcctcaaggacagggaactggggactggcctcaagtaggcattagaataaactgcccacagagtttaatgtggagaggtgtaaaatatttgaaccttccttataaacacatgctagccaagcttgcagctctgttatggaagttgatgctctgtgggtaacagactcactcttcatccttgttaaccaaggaaagctattactgcagtggccttaaaagaagcttgggcagccataatcattcagaagcactgccgcgggtatcttgttcgcagcctgtatcagttgattcgcatggccaccatcacaatgcaggcctacagccgaggattcctggcaaggaggaggtatcgaaagatgctggaggaacataaggctgtgatcctacagaaatacgcacgggcgtggctggccagacgcagattccagagtatccgacgattcgtgcttaatattcagcttacttacagggtccagcgtttgcagaaaaagctggaagatcagaacaaagaaaaccatgggctggtggagaagctgactagcctggctgctcttcgagctggggatgtggaaaagattcagaagctggaagcagaactagaaaaagcagccactcacaggcgaaattacgaggagaaggggaagagatacagggatgctgtggaagaggtcagctgcgggcgtgtgagacgggatggaaatatgcggactctctgtgaaaaagatgagcgctgccagcttttcctatgaagtggatttctgcagagcaaatcagattttgctatcaacttccattaccaaagggagcctaccttttaggaaaggcgagatcagaggattagagtctaggggaagggaggaggttaataatgagagaaatgcaacataggttttctctttctttcaagttttgcaaaatgatgacaggcccaaagagccctggctggctgcctccctttcttccaggatgaccttggtctcctatcacttgtccttaaggtctatgccctggaaatgtcttcccctgaacagcgatgcaaagctagggtagggttttcatctctggtgtagtgaaaagagcagtcagcataaaaaccagatgccctagattcaaatcttgcctttggctgggcagccttggctaaagtcccttaccctctctgaattttagtttcctcatataaaaaaatgagaataacaaaaaaggactgacagaattgttgtgagaataaaatcatcagatgaaatacgttagccaaatgcctaccataatgaattttagtttcctcctatataaaatgagaataacaaaaagagattgacagaattgttgtgagaataaaatggtcagatgaaat

SEQ ID NO: 4660 - DNA, 4033 bp, Homo sapiens
ggatagtcgccgtcaggcactgaggaggccgagagatgaggccggagcccaccaagttctgggaagttctttctgacacaagtaagataacatctctgccatgcccacaggtgctgagaacaagagaaatcaagtgaaggaaggaggcggagtttccaagacttgggtgtcatcatttctggggacatccttgattggagattgaagtttttgaaccgaaatttagagctgattcagaagagacaaatacagaacgtccaagttagcagtcgtttcccaaatttaggagacaatgatgcaggcccaggaatccctaacactggaggatgtggctgtggacttcacctgggaggagtggcagttcctgagccctgctcagaaggacctgtaccgggacgtgatgttggagaactacagcaacctggtggcagtggggtatcaagccagcaaaccagatgcactctccaaattggaacgaggagaagaaacttgcacaacagaagatgaaatctactctcgaatctgttctgaaatcaggaaaattgatgatcctctgcagcatcacttgcaaaatcaaagtattcagaagagtgtgaaacagtgccatgaacagaatatgtttggaaatattgttaatcagaacaaaggtcatttcctgctgaagcaagattgtgatacgtttgacttacatgaaaaacctttaaaatcaaatttaagttttgaaaaccagaaaaggagctctggcctaaagaactctgctgagtttaatagagatgggaaatccctttttcatgctaaccataaacaattttatactgaaatgaagtttcctgcaattgcaaaacctattaataagtcccagttcattaagcaacagagaactcacaacatagagaatgcccatgtatgcagtgaatgtgggaaagccttcctcaagttgtctcagtttattgatcatcagagagttcacactggagaaaaacctcatgtatgcagtatgtgtgggaaagctttctccagaaaatccagactaatggaccatcagagaactcatacagaactgaaacattatgaatgcactgaatgtgacaaaaccttcctcaagaaatcacagctcaatatacatcagaaaactcatatgggagggaaaccttacacatgtagccaatgtgggaaagccttcatcaagaagtgtcggctcatttatcatcaacgaactcatacaggagagaaaccccatggatgcagtgtatgtgggaaggccttctctacaaagttcagtctcactacacatcagaaaactcatacaggagaaaaaccttatatatgtagtgaatgtggaaaaggcttcattgagaagaggcgtcttactgcacatcatcgaactcatactggtgagaaaccctttatatgcaataaatgtgggaaaggcttcaccttgaagaacagtcttatcacacatcagcaaactcatacaggagagaaattatatacatgtagtgaatgtggaaaaggcttttcaatgaagcactgtctcatggtacatcaacgaactcatactggagagaaaccttataaatgcaatgagtgtggaaagggcttcgctttgaagagcccactcatcagacatcagcgaacacatactggagagaaaccctatgtatgcaccgaatgtcgaaaaggtttcaccatgaagagtgacctcattgtacatcagcgaactcatactgcagagaagccatatatatgcaatgattgtggaaaaggcttcactgtgaagagccgccttattgtgcatcagcgaactcatactggagaaaaaccctatgtatgtggtgagtgtggaaaaggctttccagcaaagatccggctaatgggacatcaacgaactcatacaggagagaaaccttatatttgcaatgagtgtggaaaaggcttcactgagaagagtcatctcaatgtacatcggcgcactcatacaggagagaaaccctatgtatgcagtgaatgtggcaaagacttaactgggaaaagcatgctcattgcacatcagcgaactcatactggggagaaaccttatatatgcaatgaatgtggaaagggcttcaccatgaagagtactctcagtatacatcagcaaactcatactggagagaagccatacaaatgcaatgaatgtgataaaaccttcaggaagaagacatgcctcatacaacatcagcgatttcacacaggaaagacttcctttgcatgtactgaatgtggaaaattctctttgcgcaaaaatgatcttattacacatcagagaattcacacaggagagaaaccgtacaaatgcagtgactgcgggaaagccttcactacaaaatcagggctcaatgttcatcaaagaaaacatacaggagagaggccctatggatgtagtgattgtgggaaagcttttgcgcacttgtctatccttgttaaacacaggagaattcacaggtagtcattttgggaaagcctcttgccagatgtaggcccttaagatatctgcaaagaagagtaatttcatgaatgcagactacatggttgtttatttagtgatcagttacttcatgttttgtgtcagagaaaacatgtacaaaacatttgagaaaatattttaggacattatgtctaaaaattgtatactgagaaaaatcctatgaatgtggcagactataaaagcctttggtgggaagataaaccccctcagaagtgatcatagatcatgaataaactactaattcgtggaaatgtaataattataggaacgtctttgcccaaaaataaaacttcaacagattgagagagttcacactggagaaatactttcctctggcaaacccctgtggcagggttttcagtaaaatgttttgcctcatcgtgtgctaggaaataatgcagaaaaaacttatgaaaacattcaatgtagaagacttttaggaaaatatcagagaatttaatgaaggaaagaagccttggcaaaatgatggatgagagctttctgtcacaattctaaccttaacagataatatgcctcatgtgcatttgggaacaggatagcttgagccatattcctagttgccttgtcactgattttatacattttaaattgtgacttcctctaatcacgaactaaaatttaatattgtatataataccggagtattttatgcctgcctcattttattatatgattagctcctgcatttctttggttctaagtttgtgttatttcagaataactaaagtacttcagaatgaaactggatacagtatattcagttcataagtgtaattgaccatacttgaatatgtttaagtttataagtaacatcaggtgttatgaaattaatataaataagatgtttttgtaagtttttattttgaaataagtttagattcacaaaatcttaccaaaatattccagagttcttgcccttaacccagcttcttccaaagataacaacttacataagcatagttcattaccaaatacaggaaagtgaaattgttacaatactgttaactacagaatttatttggaaatcaccagttttaacatgcatgcatttttgtttgttttttatatgtagctttaagaaatcttaacacatatattgattcatgtcaccaccaccgtaatcgagattcagaatgttgcatcaatgcaaactccctcatgctccttgtttatagtcacaacctctcctcagccctaacccttggcaatcagaaatcttttcatctttagttttgtcattagtagcatgttataaaaatggaatcatacagcatgtacccttttggtattggctatttcaactaaagcagattaacctgaaatccatccaagttgttctgcatatcattgttctgtttttattggccactaataatctatgatacgaatataccactatttgtttattcacccactgaaggacattagttttgttcccggtttttcttactgttacaaataaaaatcctatgaacatttgtacac

SEQ ID NO: 4661 - DNA, 4275 bp, Homo sapiens
gattcaatggaataatatgtaccaggctctggaacaagggggcatgacatttggctgggtttgctggatgattctttttgattcaagcctttattttttgtgtggatggtacttgagcaacttgattcctggaacatttggtttacggaaaccatggtatttcccctttactgcctcatattggaagagtgtgggtttcttggtggagaaaaggcaatactttctaagttctagtctgttcttcttcaatgagaactttgacaataaagggtcatcactgcaaaacagggaaggagagcttgaaggaagtgccccgggagtcaccctggtgtctgtgaccaaggaatatgagggccacaaggctgtggtccaagacctcagcctgaccttctacagagaccaaatcaccgccctgctggggacaaacggtgccgggaaaaccactatcatatccatgttgacggggctccaccctcccacttctggaaccatcatcatcaatggcaagaacctacagacagacctgtcgagggtcagaatggagcttggtgtgtgtccgcagcaggacatcctgttggacaacctcaccgtccgggaacatttgctgctctttgcttccataaaggcgcctcagtggaccaagaaggagctgcatcagcaagtcaatcaaactcttcaggatgtggacttaactcagcatcagcacaaacagacccgagctctgtctggaggcctgaagaggaagctctcccttggcattgctttcatgggcatgtcgaggaccgtggttctggatgagcccaccagtggggtggacccttgctcccggcatagcctgtgggacattctgctcaagtaccgagaaggtcgtacgatcatcttcacaacccaccacctggatgaagctgaagcgctgagtgaccgcgtggccgtcctccagcatgggaggctcaggtgctgcggtcctcccttctgcctgaaggaggcatatggccaggggctccgcctgacactcacgaggcagccttctgttctggaggcccatgatctgaaagacatggcttgtgttacatccctgataaagatctatattccacaagcatttctcaaagacagcagtggaagtgagctgacctacaccattccaaaggacacagacaaggcctgcttgaaagggctcttccaggccctggatgggaacctgcatcagctgcacctgacgggctatgggatctcagacaccaccttagaagaggtgtttttgatgcttttgcaagattccaacaagaaatctcacattgccctggggactgagtcagagctgcagaaccacaggcctacaggacatctgtctggctactgtggctccctagcacggcccgcaactgtgcagggcgtccagctgctccgcgcacaagtggccgcgatcctggcccggaggctccgccgcacgctgcgcgccgggaagagcaccctcgccgacctgctgctgccagtcctcttcgtggccttggccatgggcttgttcatggtgagacccctggccaccgagtaccctcccctcagactcacacctggacattaccagcgggccgagacctactttttcagcagtgggggcgacaacttggacctcacccgtgtgcttctgcggaagtttagagatcaagatttgccctgtgcagatttaaacccacgccagaagaattcttcatgctggcgcacagatcccttttctcacccagaattccaggattcatgtggctgcctgaagcgtccaaatagaagtgctagtgctccctacctgaccaaccacctgggccacacactgttgaatctctcaggcttcaatatggaggagtacttgctggcaccatctgaaaaaccaaggcttggaggttggtcttttggattaaaaatccccagtgaagctggaggtgcaaatggaaacatatcaaaacccccaactctggcaaaggtgtggtataatcagaagggttttcattccctaccttcctacttaaatcatctaaacaaccttattttgtggcagcacctaccccctactgtggactggagacaatacggaataacactctacagccacccatatggaggggccttgctgaacgaggacaagatcctggagagcatccgtcagtgtggagtggccctctgcatcgtgctgggattctccatcctgtctgcatccatcggcagctctgtggtgagggacagggtgattggagccaaaaggttgcagcacataagtggccttggctacaggatgtactggttcacaaacttcctatatgacatgctcttttacttggtttccgtctgcctgtgtgttgccgttattgtcgccttccagttaacagcttttactttccgcaagaacttggcagccacggccctcctgctgtcacttttcggatatgcaactcttccatggatgtacctgatgtccagaatcttttccagttcggacgtggctttcatttcctatgtctcactaaacttcatctttggcctttgtaccatgctcataaccattatgccccggttgctagccatcatctccaaagctaagaatttacagaatatctatgatgtcctcaagtgggtctttactatttttcctcaattctgtcttggtcaaggactggtagaactctgctataatcagaccaaatatgacctgacccacaacttcggcattgattcctatgtgagtccctttgagatgaactttctgggctggatcttcgtgcaactggcctcgcagggcacagtacttctcctcttgagggttctgctacactgggaccttctgcgatggccaaggggtcattctactctccaaggcacagtcaaatcttctaaggatacagatgttgaaaaagaggaaaagagagtgtttgaaggaaggaccaatggagacattcttgtgttatacaaccttagtaaacattatcgacgctttttccagaatattattgctgtgcaagatattagtttgggcataccaaaaggagagtgctttggacttctaggggtgaatggagctgggaagagcacgactttcaaaatgctgaatggtgaagtttctctaacttcaggacatgctatcatcaggactcccatgggagacgccgtggacctgtcttctgctggcacggcaggcgtgctcattggctactgtccccagcaggatgccctggacgagcttctgactggttgggaacatctctattattactgtagcttacgcgggattccaaggcagtgcatccctgaggttgctggagacctcatcaggcgcttacacctcgaagcccacgcggacaaacctgtggccacctacagtgggggaaccaagcggaaactctctacagccctggccctggtggggaaacctgacattcttttattggatgagcccagctctgggatggatccctgctctaagcggtacctgtggcaaacaataatgaaggaggttcgggaaggctgtgctgcggtgctgacctcccacaggttttggtatcaggatgatgctggcctcataaaatgagttacagaggattccctctttttctattgattggaatagtttcagaaggaatggtaccagctcctctttgtacctctagtagaatttggctgtgaattcgtctggtcctggactttttttggaaaatatataaagcatatttggaaaatttatgacatgtatctcttggacttcatgctaagcaactataacaaagaaacctcaacttacagtggcccagacaagacacattttttcctctcgctaaattcatgtcagtgggctgtgcatcatcaggccaaccaaggccttgggttctttccaccgtgccaccatcaccatcatcatggttgatgttgactcatcagcaccgtatctacatcctagctcaagggaagtggagaaaaacaaaatccagcatggaggagtgtgaggctctttgcacaagactggccataatggttaacggcagcttcaaatgtcttggttctcctcagcacatcaaaaataggtttggtgatggttatacagtcaaagtttggctctgtaaggaagcaaatcaatattgcactgtttctgaccacttgaagctttattttccaggaattcagttcaagggacagcacctgaatttattagaatatcatgtgccaaaaagatggggatgcctagctgacttgttcaaagttatagagaacaataaaaccttcttgaatatt

SEQ ID NO: 4662 - DNA, 3411 bp, Homo sapiens
ctataaatacatagtaaatatttataaaagctcatttttatctctgggcagaaaaatagtcccagttattttcttctgcaccccattgggttatcagtgtgtactctagggagactagtgactaaaaatgataggttctatttaaagttgatcggcattgaaaagaaattggactgaatagtctcactccaacaaccatcaagagtctttgtggcattttcagaattgttgatgtcatcgtatgttttaatggctttaaaaaaaaatacatttcaccttttatagtaatgttaattctatgtatttcctgtcaatagaaatctaatttatatttcgctaaacccaagctaaaaatatatattgactgtgaaatgtgcattaaattgttattgatcatagttatcaacattatgctatgttataacagctgtttgagatggagaacgtttttactgtgtcatcagatcctcatccctctcctgcagcccctccttcactttctttacccttatcttcatcttctacctcatctgggactaaaaaacaaaagaggaccccaacttatcagagatctgtaagtcaggaaagcagtcatctcagcttaccttgctttgtgttaagagcatgacctaggattgccactcattctggttgaaatatcttgccgactcaccttctaacttcccgaatcatttttttcaccttcactcttgaaagataacttcagtagattagggtcttactgcccaaagtatatctaagaatcagaagcattattatcaccttggatcttaataaagatggaaaatttcaaatccccatacctactgagtctgattttatattttaacttctcatttgagaagccctggtttacagccagaccttcttggtttgaatcttctactatttgactttggcaagtcatttaacttctctgtgtctgttttctcattggtaaaatgaggcgaatacaatactttcttgtgggcttttgtgaaagttaaatgagttaatatatgttaaacacagaacagtggctagtgtagaagaattaggacgtaaccacctacaggtgtggtggctttgatttacgtgatttgaccatcacacatatcgttgactcaaactttggtttatctttctagaatttgttactcttttttcctagtgaaaatatatcctttttattaataatgcccaacattccacttaaatggaaatacttataaatcagattttcagtgaaagggtctaaaacataattgtaatgatttagaaatgtcattactgtggtaaattatagacctaggctttgctaaggatttcgtcctgttttgtgcttcacttatagtttttgttgttttactcaaagaagggaaatggaacatccaatgtgatagtattttatgacctaggcagattccattatattgcttttaaatagctcctatttcactaaagaatgggaacgaagtgatagttacagatttcatcagtatgtaaaaagtgaagggtttcttttaggtaaagatttctttaaatgtacctgtgaaatgattcagcatttttaaaatggaaatgcttttgctgtcttggagttttgttgtttcagaagttttctactgcactattttggatagtctttcattaaaggacctaagcatgaattactctgaaattttctagtttaagtattgcatagaaagttcattttattgtgttaatctctactaacttgaaatatgccttccaaatgcatgacttactaaacagtattaaggtattggctgaagtttcaaaatagcgttaccaaatctcttaagagtctttggtagtttgtggtcgctgtctcttaatattaattacctttgttctgaaattgttgttttagtaattttcacttcatgtaaaggcagcatttgctaatgtagttgctataccttaatattaaaccccagaaattctatttttgtctgataagtggaaattctaccataatttggggcaattccccaatataataagttgtttcctctgaaatgttttattagctaaattaatgctgcagtaataaagtctataatcttcccttcattttacttttttttgcgtttttatatggaagatttagtgacttattaaccagacttaatatgctatggagataatgtacagatatgtatatattctttttctttttaaaacagatgagctttgatccaaaccttctccacaacaatggacataatgggtaccctaatggtacttcagctgcactgcgtgaaactggggttattgaaaaactgttaacctcttacggatttattcagtgttcagaacgtcaagctagacttttcttccactgttcacagtataatggcaacctgcaagacttaaaagtaggaggtaatctgtcagttctcctttgtaaaaatgtaatcacaaaatttgtcttgcatatcaatttgttcatgagtgtttttcaaaaagttttatgtaaattaaaacattttggacttttagttgtactgtttagtgaagaatatctgtataaaccagcagaatccttgaaagattatatttgcatatatttacaataaatgcttggaagatttcattgtttttccccataatgatgactgtttacccgtaagattttaagccagtacgaatattgaacttttgtaatgttacttatgattattctgtcaggtactattttgggtagtacctgaaaaaagtaatccttagagtgtcacctcttagaagctgggcgcggtggcttacgcctgtaatcccagcactttgggaggccgaggcgggcagatcacgaggtcaggagatagagaccatcctggctaacacggtgaaaccccgtctctactaaaaatacaaaaaattagctgggcgtggtggcaggcacctgtagtcccagctactcgggaggctgaagcaggagaatggtgtgaacctgggaggcggagcttgcagtaagccaagatgccaccactgcactccagcctgggcgacagagcgagaccccgtctcaaaaaaaaaaaaaagtcacctcttagattatatggaaattcattgtggctgacaccatacaaattatttcacaggcctggcatggtggctcatgcctgtattcccagcattttgggaggccagggcaagtggattgcttgagctcaggaattcaagaccagcttgcagcctgggcaacatggcaaaaccccatctctacaaaaaatgcaaaaattagctgaggaacgtgacatgtgcctgtagtcccagctactaagtagactgaggtggaaggatcgcttgagcccgcaaggtagaggttgcagtgagctgagatcgtgccgctgcactccagcttgggtgacagggagactctgtctc

SEQ ID NO: 4663 - DNA, 3371 bp, Homo sapiens
tactccctggctgccgtgaaaagacaaggcactgggcagtgatgagggtccttctccatctcccagccctcctggcttccctcatcttgcttcaggctgcagcatctaccacaagaggtgagtgtctccctttacgggttttctggggctgctgtcacaaagcacaccaactggatggcctaagacaacagaaatgtattctctcacagtacgggaggatagaagtccaaaatcaaggtgttggcagggctgtgctccctctgaaggctctagggaagaatgcttcctttcttcttccagcttctggtggccctggtatccttggtgttccctggcttgtagctgcaacactccaatctctgcctcagtctttgcgtggcctttttcactgggtgtcctctcctcttctcataaaaccaccatttattggatttagggccgatgctaaggcagtatgacctcattttaattcataacatctacaaagaccctacttccaaataaggtcacattctgaggttccatgcagatgtgaattttgggagggccattatttaacccactacactctccttgttgagaaaacagatcctgtcctccatgctccagaccccaatacaagagggaacagggaatcccaccattactctcatgccatccccttctgtacgtcagggtcctggtgatcagtgggtcctctttgatgaacttgagatagtccacaagaccatctcaccaggaaccagagaaatccccacagtccagtagcccaagccaccctgagtggccacactccctcttcatcccatctctgggcattctagtgagatctcaaagagcaattttgacatcttgttgaagatccaagagtattcttcccattctgtgctttttccccttaaggactcttatgaaactttcctaatcttgatctcctgcctacccagatttgaggggtgggggtaatggccaagaaagagggagacaaaagcagaagacatcgcaaaggagtggtgtctgacaccctacttcctgctccccactccaaccccaagcgcagactaccagaacctctgccatctccgatactgtgagtcaggccaaggtccaagtcaacaaggccttcctggactcccgaaccaggctgaagaccgccatgagctctgagactcccaccagccgacagctctcagaatacctcaagcatgccaaaggccggacgcgcacagccatccgcaatggacaggtgtgggaggagtctttaaagagactgaggcagaaggcatccttgaccaatgtcacagatcccagcctggacttgacttcactgtctctggaggtgggctgtggtgctcctgctcccgtggtgagatgcgacccgtgcagcccttaccgcaccattacgggagactgcaataacaggtggcggggcttggggtgtgggggccgaccattccagccactccgccccgccctgccaaggcctttgtcccttgggcactctaggcagatctgccactgccttgcccacctgggctggcgttcccaccttccccaccttctcaagatcgcgcgtctccagccctctccctccagcccactgtgtgtctctggaagcggcacctttccccggggcgggggagccccgcgccttcagggggtgggcgcagttcagagaccccaaatttgagaggcccccttctctgcgtcccctccgcctcgagcagaggctccttcccccatggggtcctgggctttggagccccggagccggcctgccgaagctcagcgaggatcgtgctggtttcaggaggaagcctgcgctgggcgccgccaacagggctctggcgcgctggctgcccgcggagtacgaggacgggctctccctgcccttcggctggacgccggggaagacgcgcaacggcttccctctcccgctggcccgggaggtatctaacaagattgttggctatctgaatgaggagggtgttctggaccaaaacaggtccctgctcttcatgcagtggggtcagattgtggatcatgacctggactttgcccctgacaccgagctggggagtagcgagtactccaaagcccagtgtgatgagtactgtatccagggagacaactgcttccccatcatggtacggccctgcagctgggcatctctgactagccccttgcccaccctgatgtagcagacattcccagcccatcagctaggatctctggatagatctgggatactgatttggtagtttcccatgcctcacgtgtccattcgttcactcatccgtttattcagtaaatagacattgaccaccccataccaggcagtgcactaagcgctgaggattccaaagtgaacaggacactgctcctgctctcaagaacaaagggccagtgtgggaattggacaagtaaactactgatagcagaatgggaacactggagaaggttgtctacattcccgacccagcagcattggtaaaacctgcttattagaaatgtaaaatctcagttgggcgaggcggctcatgcctataatcccagcacttggggaggctgaggtgggcagatcacctgaggtcaagagtttgagaccagcctggccaacatggtgaaaccccgtctctactaaaaatacaaaaattagcctggcgaggtggcacatgcatgtggtcccagctactcaggaggttgaggcaggagaaccgcttgaacctgggaggcggaggttgcagtgagccgagatcacgccactgcactccagcctgggcaacagagcaagattccaactcaaaaaaagaaaaaagaaaaagaaaaaaaaatgcaaaatctcaagtctcacccaagatgttaggaaatagattctacatttttaccaagatcaacagagattcattttatacatgataaagtttatactgctgtacatcatcgtggaggatgacttcaactccactcagaaggacttgaaacctggatgaatccgagtgagcagcagggatttgtagggatttccatccggaagggagaggagcttgcagcaatgcatcttttcttattattcatgggtattacagttggagagtcatttcttcactcaaagaataaatcgaggctatgtgctgtggtataaagagcataaactgtggaatgaagccaatgatctgaatcctacatctttcccttccagtgtataagttcttaggcaacttacttaacttttctgagccccagttttctcatctataaaatggaactgaattgtccaccttacagggtttttttgaggactgagatgagttaaagtatgcataattcctggcacatggtaagtccaaaataaatacatggcagctgtt

SEQ ID NO: 4664 - DNA, 3707 bp, Homo sapiens
aaaagatggccggagcggcggcggcggtggccgcgggagcagcagctggagccgccgcggcagccgtgtcggtggcggctcccggccgggcctcggcgcctccgccgcccccgcccgtgtactgtgtgtgccggcagccgtacgacgtgaaccgcttcatgatcgagtgcgatatctgcaaggactggttccacggcagctgtgttggagtagaagaacatcatgctgttgacattgacctgtatcactgtcccaactgtgcagttttacatggttcctccttgatgaaaaaaaggaggaactggcacagacatgactacacagaaattgatgatggttccaaaccagtgcaagctggaactagaactttcattaaggaattacgctctcgagtcttcccaagtgccgatgaaataattataaagatgcatggcagccagctgacacaaagatatctggagaaacatggatttgatgtccctattatggtcccaaaattagatgatctaggactcaggctcccttcacctacattttctgtgatggatgtggaacgttatgtaggtggtgacaaagtgatagatgtcattgatgtggcgaggcaggcagacagcaaaatgacacttcacaattatgttaaatacttcatgaatcctaacagaccaaaagtgttaaatgtgatcagccttgaattttcagatacaaagatgtctgaattggtggaggtccctgatatagccaaaaaactttcctgggtggaaaattattggccagatgattcagtctttcccaagccatttgttcagaaatattgcttaatgggagttcaagacagctatacagatttccacattgacttcggtggaacttcagtctggtaccatgtcctctggggtgagaagattttttatttaataaagccaacagatgaaaatttggcacgttatgaatcttggagttcatctgtgacccagagtgaggtgttctttggagataaggtggataaatgctacaaatgtgtggtaaagcagggacataccttatttgttcctacagggtggatccatgctgtgctcacttctcaggactgtatggcttttggggggaacttcctgcacaaccttaacattggcatgcagctcaggtgttatgagatggagaaaaggctaaaaacaccagatcttttcaaattccctttctttgaagccatatgttggtttgtagccaaaaacttgctggaaaccctgaaagaactgagagaagatggtttccagcctcaaacttacctagtacagggagtgaaagcactgcatactgctttaaaattatggatgaaaaaagaacttgtatctgaacatgcctttgaaattccagacaatgttagacctggacaccttattaaagaactttctaaagtaattcgagcaatagaggaggaaaacggcaaaccagttaaatctcagggaattcctattgtgtgtccagtttcacgatcctcaaatgaagcaacttccccataccattcccgaagaaagatgaggaaacttcgagatcataatgtccgaactccttctaacctagacatcctagagctccacacaagggaggtcctcaaaagattagagatgtgtccatgggaagaggacatcttgagctctaaactgaatggaaaattcaacaaacatctccaaccatcctccacagtacctgaatggagagcgaaagataatgatctacgattactgctgacaaatggaagaataattaaagatgaaaggcagccctttgcagatcaaagtctttatacagcagatagtgaaaatgaagaggataaaagaaggacaaaaaaggcaaaaatgaagatagaagagagttcaggagtagagggagtggaacatgaagaatctcaaaaaccactgaatgggttttttacacgtgtgaaatcagaactcaggagtagatcatcaggatattctgatatttctgagtcagaagactccggacccgagtgcactgcactgaaaagtatctttaccactgaagagtctgaaagttcaggtgatgaaaagaaacaagaaataacatccaactttaaggaggaatctaatgtgatgaggaacttccttcaaaagagccagaagccatctagaagtgaaattccaattaaaagggaatgtcctacctcgacgagcacagaggaagaagctattcagggcatgctgtctatggcagggttgcactattccacgtgtttacaaaggcaaatacaaagcacagactgcagtggtgaaagaaactctctccaggatcccagcagctgccatggcagtaaccatgaggttaggcagttgtatcgctatgataaaccagtggaatgtggataccatgtcaagactgaagatccagacttgaggacttcctcctggattaaacagtttgatacttccagatttcatcctcaggatctaagtagaagccagaaatgcatcagaaaggaaggttcatcagaaattagtcagagggtacaaagtaggaattatgtggacagcagcggctcaagccttcagaatggaaagtatatgcagaattcaaacctgacttcgggggcgtgccagataagtaatggcagtctaagcccagaaaggccagttggtgaaacttccttctcggtgccccttcaccccaccaagagaccggcatcaaatccccacctatcagcaaccaggcaacaaaaggtaaacgtccaaaaaaaggaatggcaacagccaaacaacgtcttgggaagatccttaagttgaacagaaatggccatgcacgtttctttgtgtgacagagctgctgttgcagccattcttccctttggagaccagtctaggggtgcaggagcctggagcttccgctgtccccctgcctggagcagtttgtgtgtatagtaagaacactgcccgaagaacagaatgaacctgatgctgcattttcactgtgccacacccactcagcaataaccattttggacctggtgggggagaggaagaaggagggtagaaccttaaaaagagaccttgaactggaaagggtctcttgtcagggcttgaattttattttgttgttggtagtgtcttgatgtattttcagtggtagggtaaagaattatcaataatttatttaacagatttttttttaaagttaacagcttttaaattctttttttaaagctatttatttggaagatttctggagaaatatctcactaatttagatgtaagaatgtgaaggtttttaaattatttttgatagtgtgtgtgttacatgtggggaagggccacagtaacagtaactagtctggactcttaaatttgatattcaggttaaagtcttaaacagggatttgatgcattaattattttaaattaagatgtatatgaaaatcattttattttatatatttcatgtgttttttataagctattagcttcgcttttgctaacatccaaggtgcatactgttatccaggttgattaccttatatcccaccttccctctgcactccccatcattttgtgatgacccagtaagactcttctctttgcagggaaacactttcgtagccaatgtgtaagaactccatgaaagatccctcatttctcatttcgtttgacattgtgattttcttctcaacattaaaaaaaataggcttttgcattttc

SEQ ID NO: 4665 - DNA, 3660 bp, Homo sapiens
ttccggggtcgcagtcccgggcatggagccgcgaccgtgaggcgccgctggacccgggacgacctgcccagtccggccgccgccccacgtcccggtctgtgtcccacgcctgcagctggaatggaggctctctggaccctttagaaggcacccctgccctcctgaggtcagctgagcggttaatgcggaaggttaagaaactgcgcctggacaaggagaacaccggaagttggagaagcttctcgctgaattccgagggggctgagaggatggccacctcctacgacttccacagcgagagtggcctcttcctcttccaggccagcaacagcctcttccactgccgcgacggcggcaagaacggcttcatggtgtcccctatgaaaccgctggaaatcaagacccagtgctcagggccccggatggaccccaaaatctgccctgccgaccctgccttcttctccttcatcaataacagcgacctgtgggtggccaacatcgagacaggcgaggagcggcggctgaccttctgccaccaaggtttatccaatgtcctggatgaccccaagtctgcgggtgtggccaccttcgtcatacaggaagagttcgaccgcttcactgggtactggtggtgccccacagcctcctgggaaggttcagagggcctcaagacgctgcgaatcctgtatgaggaagtcgatgagtccgaggtggaggtcattcacgtcccctctcctgcgctagaagaaaggaagacggactcgtatcggtaccccaggacaggcagcaagaatcccaagattgccttgaaactggctgagttccagactgacagccagggcaagatcgtctcgacccaggagaaggagctggtgcagcccttcagctcgctgttcccgaaggtggagtacatcgccagggccgggtggacccgggatggcaaatacgcctgggccatgttcctggaccggccccagcagtggctccagctcgtcctcctccccccggccctgttcatcccgagcacagagaatgaggagcagcggctagcctctgccagagctgtccccaggaatgtccagccgtatgtggtgtacgaggaggtcaccaacgtctggatcaatgttcatgacatcttctatcccttcccccaatcagagggagaggacgagctctgctttctccgcgccaatgaatgcaagaccggcttctgccatttgtacaaagtcaccgccgttttaaaatcccagggctacgattggagtgagcccttcagccccggggaagatgaatttaagtgccccattaaggaagagattgctctgaccagcggtgaatgggaggttttggcgaggcacggctccaagatctgggtcaatgaggagaccaagctggtgtacttccagggcaccaaggacacgccgctggagcaccacctctacgtggtcagctatgaggcggccggcgagatcgtacgcctcaccacgcccggcttctcccatagctgctccatgagccagaacttcgacatgttcgtcagccactacagcagcgtgagcacgccgccctgcgtgcacgtctacaagctgagcggccccgacgacgaccccctgcacaagcagccccgcttctgggctagcatgatggaggcagccagctgccccccggattatgttcctccagagatcttccatttccacacgcgctcggatgtgcggctctacggcatgatctacaagccccacgccttgcagccagggaagaagcaccccaccgtcctctttgtatatggaggcccccaggtgcagctggtgaataactccttcaaaggcatcaagtacttgcggctcaacacactggcctccctgggctacgccgtggttgtgattgacggcaggggctcctgtcagcgagggcttcggttcgaaggggccctgaaaaaccaaatgggccaggtggagatcgaggaccaggtggagggcccgcagttcgtggccgagaagtatggcttcatcgacctgagccgagttgccatccatggctggtcctacgggggcttcctctcgctcatggggctaatccacaagccccaggtgttcaaggtggccatcgcgggtgccccggtcaccgtctggatggcctacgacacagggtacactgagcgctacatggacgtccctgagaacaaccagcacggctatgaggcgggttccgtggccctgcacgtggagaagctgcccaatgagcccaaccgcttgcttatcctccacggcttcctggacgaaaacgtgcactttttccacacaaacttcctcgtctcccaactgatccgagcagggaaaccttaccagctccagatctaccccaacgagagacacagtattcgctgccccgagtcgggcgagcactatgaagtcacgttgctgcactttctacaggaatacctctgagcctgcccaccgggagccgccacatcacagcacaagtggctgcagcctccgcggggaaccaggcgggagggactgagtggcccgcgggccccagtgaggcactttgtcccgcccagcgctggccagccccgaggagccgctgccttcaccgccccgacgccttttatccttttttaaacgctcttgggttttatgtccgctgcttcttggttgccgagacagagagatggtggtctcgggccagcccctcctctccccgccttctgggaggaggaggtcacacgctgatgggcactggagaggccagaagagactcagaggagcgggctgccttccgcctggggctccctgtgacctctcagtcccctggcccggccagccaccgtccccagcacccaagcatgcaattgcctgtcccccccggccagcctccccaacttgatgtttgtgttttgtttggggggatatttttcataattatttaaaagacaggccgggcgcggtggctcacgtctgtaatcccagcactttgggaggctgaggcgggcggatcacctgaggttgggagttcaagaccagcctggccaacatggggaaaccccgtctctactaaaaatacaaaaaattagccgggtgtggtggcgcgtgcctataatcccagctactcgggaggctgaggcaggagaatcgcttgaacccgggaggtggaggttgcggtgagccaagatcgcaccattgcactccagcctgggcaacaagagcgaaactctgtctcaaaataaataaaaaataaaagacagaaagcaaggggtgcctaaatctagacttggggtccacaccgggcagcggggttgcaacccagcacctggtaggctccatttcttcccaagcccgagcagagggtcatgcgggccccacaggagaagcggccagggcccgcggggggcaccacctgtggacagccctcctgtccccaagctttcaggcaggcactgaaacgcaccgaacttccacgctctgctggtcagtggcggctgtcccctccccagcccagccgcccagccacatgtgtctgcctgacccgtacacaccaggggttccggggttgggagctgaaccatccccacctcagggttatatttccctctccccttccctccccgccaagagctctgccaggggcgggcaaaaaaaaaagtaaaaagaaaag

SEQ ID NO: 4666 - DNA, 2235 bp, Homo sapiens
gaggaggaggaggagcaggcgccgccatggccgccgctatcaccgacatggccgacctggaggagctctcccgcctgagccctctgccccccggcagcccgggttcggcggcgcggggccgggctgagccccccgaggaggaggaggaagaggaggaggaggaagaggaggcggaggccgaggcggtggcggcgctgctgctgaacggcggcagcggtgggggcggcggaggcggcggcggaggagtggggggcggcgaggcagagacgatgtcggagccgagccccgagagcgccagccaggccggggaggacgaagacgaggaggaggatgacgaggaggaggaagatgagagcagcagcagcggcgggggtgaggaggagagtagcgccgagagcctggtgggcagcagcggcgggagcagcagcgacgagacccgctcgttgagccccggcgccgccagcagcagcagcggggatggggacggcaaggagggcctggaggagcccaagggaccgcggggcagccagggcggcggcgggggcggcagcagtagcagcagcgtagtctccagcggcggcgacgagggctacgggactgggggaggcggaagcagcgcgacctccgggggccggcggggcagcttggagatgtcgtcggatggggaacccctgagccgcatggactcggaggacagcataagcagtactataatggatgtagacagcacaatttccagtgggcgttcaactccagcaatgatgaatggacaaggaagcactacttcttcaagcaaaaatattgcctataattgttgttgggaccagtgctaggcttgcttcaactctagcccagatctggcagatcacatccgttccatacatgtagatggtcagcgaggaggggtatttgtttgcttatggaaaggttgtaaagtatataacactccatctaccagtcaaagttggttacaaaggcatatgctgacacacagtggagacaaacctttcaagtgtgttgttggtggctgcaatgccagctttgcttctcagggagggctagctcgtcatgtacccacacacttcagtcagcagaactcctcaaaagtttctagccagccaaaggccaaagaagaatctccttctaaagctggaatgaacaaaaggaggaaattaaagaacaaaagacgacgctcattaccacggccacatgatttcttcgatgcacaaacactggatgcgataagacatcgagccatatgctttaacctctcagctcatatagaaagtttagggaagggacacagtgttgtttttcatagtactgtaatagctaagagaaaagaagattctgggaagatcaaacttttgcttcattggatgcctgaagacattctgcctgatgtgtgggtgaatgaaagtgaacgacatcagttaaaaactaaagtagttcatttatcaaagctacccaaagatactgccttgcttttggacccaaacatatacagaacaatgccgcagaagaggttgaagagaactctgataagaaaagtgttcaatttgtatttaagcaaacagtgaacgacgtttgcaatcaactaaaaattcgtctatcgaattagggctgaaaattactgttaaagagtgttgcagtatgtctggtggctcccttttcaggactagggctttctcatggagtacagtatgttaatatttacctatataactaatctgttaacggtttttgaaaaacctttcaaattatttgaataatcttcatattttcatttaacctatatgactctaattttttttctgaggaaatcatttggtttttgagttgttttttcttaatgtaagaaaaattgtattttttttacaagtatcttcaaactgaatcttttatgcaccaaagttggtcttgaaaaggaaaataaaatcactttcttgcttggtaagcaagaagccatatcgattttttttaacttacagaaatggaaatatgtgtaacttgttagtattgtattaaacaaatgttgcatagagataatagaacattgcttgtaaataattcagcagatttgtaatatatttttatattttgaaatgtactgtagatgttttctagaggcatgaaagttaaatgtatatattatggtagaaataatattgaaggatattgtacttcactagtgctgccagaggaattgttaataaaagcaccttctttaacaat

SEQ ID NO: 4667 - DNA, 2526 bp, Homo sapiens
ttgttaatgctgaaaaacgtgggtttttcattgaggaaagatgatgctttatcacttaaggaattgatcactgaagcccagaccaaagccagcggggcaggcagcgagtttcaggaccagaccaggattcggtttatgctagagacgatgttggccctgaagaacaatgacatgcgcaaaattccaggctatgaccccgagcccgtggagaagctgaggaaactgcagagagctttggtgagtcaaggaactttcaattctgttttgctcagagcttccgtgtcggcatgagcctgtcatgaaaatcaagaaatagtcagacctgcacgtcagggtggtgtctggtgagtgagagtgctcagaggcagagtgaacgcggctcggttttcctcaggggctgtcccagtggtctgggcgtgctcgtgcagaatgtccgtgtgtggggaagcccatgttgggcgagcgtcctctttgcctcaccccgggtgctaaacttgggctgcaccattggatcatccgatgctttcagagaaggccaagtccccatccggaccaaggaaattgggatgacgtaggtcctttgactctctctgacatgcagccaggatggagactggggcagcctccctgtcggagtgagtctttcagcccctgtcatctcaagtccaaatcattgctgacccaggctcttccaggcatgtgctcacctgccactgagcctgaggcagctctgttactctctcctgttgggacagctttccaaacacaaaacactgagtttaccgctagttttggcatttttccaaacaggctaaccgtcccaattgccagtgacccattccagtattcatgcaccagaaatgtcatggtcaaaaacaaaaagccaccggtgatggaaggacggaatatgaaccaattaaaagcatttcattagctcttctctcttcatcaggtccgcaacgccggctcaggttctgagacgcagcttcgcgtctcctgggacagtgtcttgagtgcggagcagacgggtcgctggtggattgtggggtccgcctggagtggggccccgatgatcgacaacagtcaccatacgcacctgcagaagcagcttgtggggacggtagggacacccatgctcaaggctgccaggcagaggcacccccctgtgtggtgtgtggtcctggctttacctggagcagctctcttactgttcttgaatggtcactgaaatgtacaaggtttatctggaggccttacagaaattgctattaatattacattgtgatataattattccatttctgttgtatctttttattggactttaaaagatctaaaagttgaatggcacggggcaggggagcgcatgaggacctgaacgctcacggggcaggagtccgttgctgagacccctcaggctgccccccgggctgtgcattctaggctacaggctatggatttcacattgtggaaattcaagcccatttttcatccagacttccctcgttatcccctcatgtccttccctgtcccagattctgtgtcactcatggtcacggtttcccaggctctgccagtgactggttctctgttttattcatcgtcgcttgccctgaggttgaaccacgactgagaagcctcccacatgagtgttttctcccccagcggctgtggcttcactatgtgttccccttgcacagaggggcgttgcccgagagtggacttggtgccatccgcccacgtagacctcacagttctattcagtgacactgaagtacagtttggcacctctcgggaggcagtttgcatggagacatgcgtatgacttgtccattcatcgtgcttccaggtcagttcaaagatcctagaactcgcccggaagcagaggatgaacacagacatccggagaaacatattctgcacaataatgacaagtgaagattttttggatgcttttgaaaagcttctgaagtaagcatttgtgtgcacattttgacctattaatgagatgctgtaaaataagtaagttgatttgctttttgagttttggacgactgagtctgatgctgcctagggaggactgggctgttctcatgaccatccgctcacgctgttggattcgtgcatctctgggttagtcgtcatgttcctattaatttgcctctagtagttcctcattagaacattttatgatatataaagattgggggtttggggtttttttttttgagacagggtcttgccatgttgctcaggctggagactggggagttttgactgaaagtatctgatgaccttgtcagtggctgttggttgtcacgaattgcttaaaaatacataaatcttcataataaagctattctgattcttcatttaaaacatcctggtatagtttctataattagttgtaataagattttaaagatcctgtaatcccagctacttagaaggctgagacaggaggatcactttagcccagtagttcaagaccagcctgggcaacatactgagacccccatctcattt

SEQ ID NO: 4668 - DNA, 2510 bp, Homo sapiens
acttccctcctccccgcgctgcgagcagcatcctctgcagaccctcggtcctcgcgcccggggtcgtcccgctcctgcggctcagcgtggtggcctcccctcgcccgccaccccggcaactttctctgcccgctcccgcgggttgggggctgccgtgccgggggctaactgggggcagcctctggagaagggcttcagagtcccggagacgcccgccacccgcagcctgcccgcggtgggcctgccgtcggatctcggcaccctctcctcccctctccccgaaccatgaccgagatgagcgagaaggagaacgaaccggatgacgcggccacccacagccccccagggaccgtctccgccctccaggaaaccaagctccagcgattcaagcgctccctctccctcaagaccatcctccgaagtaagagcttggagaacttcttccttcgctcgggctctgagctcaagtgccccaccgaggtgctgctgacgcccccaaccccactgccccctccctccccaccacccacagcctcggacaggggcctggctaccccatccccctccccatgcccagtcccacgccccctggcagcgctcaaaccagtgaggctgcacagcttccaggaacatgtcttcaagcgagctagcccttgtgagctgtgccaccagctcatcgtaggaaactccaaacagggcttgcgatgtaagatgtgcaaagtcagcgtccacctctggtgctctgaggagatctcccaccagcaatgcccaggcaagacgtccacctccttccgccgcaacttcagttcccctctcctggtgcatgagccgccaccagtctgtgccacaagcaaagagtccccacccactggggacagtgggaaggtggaccctgtctacgagaccctgcgctatggcacctccctggcactgatgaaccgctccagtttcagcagcacctctgagtccccgacaaggagcctgagtgagcgggatgagctgaccgaggatggggaaggcagcatccgcagctctgaggaggggcctggtgacagtgcatctccagtattcacagccccagcagagagtgaagggccaggaccagaggagaagagtcctggacagcagctccccaaagccaccctgcggaaggatgtggggcccatgtactcctacgttgcactctacaagtttctgccccaggagaacaatgatctggctctgcagcctggagatcggatcatgctggtggatgactctaacgaggactggtggaagggcaagatcggcgaccgggttggcttcttcccagctaattttgtgcaacgggtgaggccaggcgagaatgtttggcgctgctgccaacccttctccgggaacaaggaacagggttacatgagcctcaaggagaaccagatctgcgtgggcgtgggcagaagcaaggatgctgacggcttcatccgcgtcagcagtggcaagaagcggggcctggtgccagtcgacgccctgactgagatctgagaggagccaagggaacccagatgacacccttgcccatgcctggaccttgcttctggccagggaggggatcaggcccccttgtccactccatacccttcctccctctgtccctctcctaggtgccacttaccgtggcttaggagccttttgtactggggaagattttatttcttgggtggggtgccctgagtgggttgatcctctgggacttggcggggatggggtggggtgggagggaatgaggaagctacaggtaggtccacccaacgcccaggcaccccagtctacttgctgggctgagtccagccctggggaagattcctggggaatttatttgctgcttctcccagccttcccctgcccacaccacctgcgcatgcctggcacacccctctccccacagagcctctgcttgggtctatgtgtgtgtgaccgtgcatctgctcctttgcaagtggggtcttgggagcaggcctttttgtgtcctcggccctccacccttggtggggaggggacccaggaccataggaaggtcctgagtccacctcctggtctccacctctgtcattccgtcaattctcaggaaagttttgcaggaatctctcccgttacttgaaacctgggcggacagatgaggggaaggctgaggtccctggaaggtgtaacaaatcagagactatctgttcaagtagaaaacccaagagctggccaggtgtggtggctcatgcctgtaatcccagcactttgggaggctgaggtgggcagatcacctgaggtcaggagttcaagaccagcctggccaacatggtgaaaccccgtctctactaaaagtacgaaacttagccaggcatgatgggggtctgcctgtaatgccagctactccagaggctgaggcaagagaatcacttgaacccgggaggcggaggtttcagtgagccgagattgcaccattgcaccccagcctgggcaacagagcgagactccgtctc

SEQ ID NO: 4669 - DNA, 2536 bp, Homo sapiens
aagttggagtgcagtggcacaatcttggttcactgcagcctctgcctcccaggcccaagccatcttcccacctcagcctcctgagtagctgggattacaggcacacaccaccacacctggctaatttttgtgtcgttttttttctgtagagacgaggtttcgccatgttcccgaggctggtcttgaactcatgagctcaagcggtctgccggccttggcctcgcaaagtgctgagattagaggcgtgagccgcctcactcagccttcattcctttttatggccaaataatattctgttggatgaatgggccacgttgtgtttttccatttatccgttgacaggcactttgttaccactttttggcatttcttcgaggatctttatagtctgacagtttgattttcatttggtgacaaggggattgttcttacacaaggccttggtcgtactgatgctgtcagctggaggatgtattttgcttcctgttcacattgtctgtgcgtgggatggtcatgagtcagggggtagagcgggtgtgttagccttggggtattttggtgagacaattcggtttaaggaaggaaacacgttttcaggacccgtaccccaaaacacaaccataacccgaggtcgccacttggctgagctgtcccccacagggacttcaggtccctggttcctccatccccaatctgcttccttccattcccgccagaaccagggtattttccaagggcaggtttcacatccacttggggcagggatcttaagccacagtaagactaatttccaggtcccaggtctcctgggaaaccccaaaagactgagccctgccgagtgagaacattctctgaagctctgataatcaaaacagcgtggcacctcacaagcctcagcagcccagaggcggaccacatgtataaaataacgccatgtgtagtatttaacaaaggaggctccccaatccagggagggaaggattctttcacaaaaggcatgaaaacagttgcttccatgtttggaagcagttttgttttgttttttgtttgtttttttgatacatggtcttgctctgtggcccaggctggagtgcagtggcatgatcacagctcactgcagccttggcctcatgggctcaagcaatccccctgcctcggcctcccgagtagctgggattatagatgtgcaccaccacgcccagctaattttttaattttttatagagatggcgtcttgtggccaggcacagtggctcacacctgtaatcccagcactttgggaggccgaggtaggagggtcacttgaggtcaggagtttgagaccagcctggccaacatggtgaaaccccatctctactaaaaatacaaaaattagctgggtatggtagtgttcaggcccaggtatagggggtcagcccagagctgtgggtgaaaggacaggcccatggtcccacctgtgggagcaggagaggaccaggccgatgagccttgcagggggcacgccagcttgtggtcccagctagtttctgctcccaccacccccatcccactcccagggagggatgtcccttctagggctacccccttccctgcagccctggctgctcagcagccgccttgagcaagcccttatccacttcctcctggcctgggggcggggcacgcatctgccagtcctgtgaccgtccccttcagccccatctctgagagtggggtttcctgagagtctgcccttctgccccgcacaccaggggcccagagctgcagaagcccccacaggctttgttcccagcagggctcagagggctcctggtgctccatcagcagtccctggaggacacggagcagtctcaagtgcagccgtccatgtggccttcagcccttgtgattccatgagctagcatcagccgtcccctcagtgggtggcagaggctgcagggagcagaagaaagagcccatccttgggttctcctggcttctcgctcagagctgctctctgctgtgaaggaggaagtaggcatatcccagtgagttttgcgtcgcctacatccaggcagctcagccataagtcagcccaaagcccgccagctgggagctgcactgagcccctggtcacaaaagtgaacgtcacaggacgggccaactctgcccaggcctcgctgtgtgcacatacacaggtgtacgcatgtatgtaggcatgaacatgtgggtggacatgtgcatgcaagtgttttgtgtacaagcatatacgtgtggctgggcacatgtgtgtgcatgagtgttcatatggaagtatatgctgggcgaggcggctggatcacttgaggctagaagttggagaccagcctggccaacatggcaaagccctgtctctattaaaagtacaaaaattagccagacgtggtgatgcacgcctatatcccagctacatgggaggctgaagcacgagaatctcttgaacccagtaggcagaggttgcagtgagctgagatcgcaccgctgcattccagcctgggtgacagagcaaggctccgtc

SEQ ID NO: 4670 - DNA, 2486 bp, Homo sapiens
aatttagccagctgtggtggcacatacctgtaatcccagctacttgagagactgaggcaggagaatcacttgaaccgggagatggagtttgcagtgagccgagatggtgccactgtactccagcctgggtgacagagcaagactctgtctccaaaaaaaaaaaaaaaaaaaaaaaaaagacatttcaagctggaagatttggttccctaactttgagcctagctctttcattaaagtaataataaaagtagaactctacatttatataatggttttgactttccaaagtgattttcacatctcagcagtcctgtgaaggactaaataaggtgtttcagggtagacttggcattgtgttttgcaaagaaggtccaaggccatgcagctatttggtgacagaattgaaagtaaagcctgattctcttgctgcaaggcgactttgctatctagaagccagggtcactagacaagatgcagtcaacaaataagtctccagaacatatgacatctccagcctaaaccaagctcacctttccatgctggctccctcatgcagacggaggacatccgcttggagccagatctatacgaagcctgcaagagtgacatcaaaaacttctgttccgctgtgcaatatggcaacgctcagattatcgaatgtctgaaagaaaacaagaagcagctaagcacccgctgccaccaaaaagtatttaagctgcaggagacagagatgatggacccagagctagactacaccctcatgagggtctgcaagcagatgataaagaggttctgtccggaagcagattctaaaaccatgttgcagtgcttgaagcaaaataaaaacagtgaattgatggatcccaaatgcaaacagatgataaccaagcgccagatcacccagaacacaggtaagatcttggcttggctctcctggccccgtggagtatctgaaaaggaattcagtggctgtagagtgacctgctcaaactcccagggctttgttgcctgggaattttaagggaggagtctgagtgtaagcagggccttcctcctttgaggagcatccagaaaaatggagggagagtcaggggagagaggaggccacaagaaccagaaaactgccctaaaagaacgttcagaaggaatcaggccggcagtccttggaaagaaaaatctagaaattcaataaaacttcatgagtgtgccaggagaatgtacgggtaatctgattcggaacagaaacatttcacctctgagttggaagacctcgtaagttaatggtcacagtgagttggatattgtatttctttttcagtgttctcaaaagtgtctgttatggggaaggttgctgatgtccccttgatttttctgaggactccttagagtattggagtctgcacaaaaccccgcagagtagaaagattcctgaggacctccagaagtactcgttaacaagtcatattgctgattaaaaacagtgtagtgagagctcagtaaatgtttattgaatagataaatccatggttgtagtcatgatcattgacataatatgctccctttaggaaggtggatatctaaaaatgtgtgaatcaggtggaatgttttgtcacatgctcactgctttctactctagattaccgcttaaaccccatgttaagaaaagcctgtaaagctgacattcctaaattctgtcacggtatcctgactaaggccaaggatgattcagaattagaaggacaagtcatctcttgcctgaagctgagatatgctgaccagcgcctgtcttcagactgtgaagaccagatccgaatcattatccaggagtccgccctggactaccgcctggatcctcagctccagctgcactgctcagacgaggtgggatttgcgtgcaaaactggttacgcacagagctgctcagagaagtttccactggagaaaagttgtttactttctctcccttcagccgtgaatgatctggtgaattgaaggccatcttctaggctctccatggtctgcattcctgttctttgtaacactgaattcaacttggcattagtcctgacactctaaagcgttgttccatatttctctgttgaacaagggtgttctttcattatagctctctgtaaatttgttcttcccttcttcttattctggatggtaaacccaagacctgccagaaagataaaagtgctttcagctgggcacggtggctcacgcctgtaatcccaacactttgggaggccaaggagggtggatcatctgaggtcaggagttcaagaccagcctggctaacatggagaaatctgtctctactaaaaatacaaaaaattagccaggcgtggtggcgtgcaccagtaatctcagctactcaggaggctgaggcaggagaatcacttgaacccgggaggcggtggttgcagtgagctgagatcatgccactgcaccccagcctgggcgacagaggaagactctgtctc

SEQ ID NO: 4671 - DNA, 2568 bp, Homo sapiens
acatacacatgctcacccacacacacgctcacacatacactcacacacacctgctcacacatacccatacatgctcacccatacacatgctcacacacacatgctcacccatacacatgctcacacacatgctcacccatacacatgctcacacacacatgctcatacacgtttacccatacacatgctcacacacgattacatacacctcccacatacacgattacatgcacctgctcacacacacacatgctcacaaattacatacacatgctcacacatacacatacatgctcacaaacatgattacatacacctactcacacacacatgctcacacaattacatacgcctactcacacacacatgctcacacaaattacatacacctgctcatacacacacacatgctcacacgattacatacacatgctcccacatgctcacctatacacatgctcacatacacacgagtacatacacatgctgacacatgctcacacacacgattacatacacatgctcacacacattcacattcacatgttcacgcacacatgctcacatgctcacccatacatacacacgattacatacacatgctcatacatacacgattacatacacatgctcacacaggctcatacacatgctcttacccatacatgctcacacacacacatgctcacacacaagcacacatgatcacacaggcacacatgatcacacatacacaggcttgcacaagtttacacacatactcatacatgctcacacaggcatacacacatgctcacatatgcacacactctcacatgtataggcacacacaggattacacatgctcacacatgtgcttatacacatacacccatgcacatgttcacacgtttatacacacatatcacacacacacacccccatatactcacacacacgctgccacatgctctgtctctcacacatacctgacagttccgtgctgtcccgtttccctcggggtcttcccttcggaggctgcagctcgtctgagcatccagccttgaaggcactgagcaggcaaggaggtagggcttttctctggggaggcctgcgttgcagtacggcttcctcatccccaccaagggcagggaagggcaggagtctaggacttacctgaatacagaacacctgggagcgtctgtctcgtgtcggccttgtgctgagcatgtgcagaccaggacttgcgccctaagccacttgttggcccctccctcagaatcatgtgcagtggcttggcctcacccacagacaagggaggcggtaagaaatgccataaagagacgctgagcctgaaggacagcaccttacacctgtgcagtccacacttgcctttccaattcgccgttgcatttcatcctcacgtcccttgacaccaaggcccagaagcggagaaggcgcacgtcgcataatgctgagttggaagggagtttgcttttcatctcttgttactgccccgtgaacaactttccaagtgacacattttgtaaaaggagagaacctgcatggaactggctgctctggggctgtctccctgcccgaggctgcttcatgctgagttactgccaggactcctaactgtcttctctctgcgctttctccaggattacggtggctacctgagcacctacatcctcccagcaaagggagaaaatcaaggccagacattcacctgcggctctgctctctctccaataacagacttcaaactctatgcctctgcgttttccgagaggtacttgggcctccatggcaccagggacaacgctgtccccgcagcagcgcctcctcccggcgcccgagagaccggcacgccacggcccctcccccaaggaacagagcaaaggatggtggccgcaggccccacgcgagcccacaggacaccggcccctagattccagccaccaagcggaagcatgagacccgcccacactagcctctgtgttcccgttagggacatcacaccctgtctcacgtcgcagtgccatggacgcagcagttacagcaccattgttttagcagtgcgtgttcatatatgggcttgctacttcctgtaatgaggacgttcaacatggtgaggggctacaagaaaacgcttttctgtacagagtcttactgtagctacgctaatggttaacctgatagaattaactcgtatttttctatggttttaacctgatgctccactgtctccgtcatggggttgttttgctgtttggggttgggccttgtttccctttcctttctccagtccacgtgtagactttgcgcttgtttggatgaagaagcagatcggaagtaactgctccctcctcaaggttgtcttcagacgtcttggagacgttcctaaacactgagggggaagacagccaatagcacccattaaaagaaatacctaaataaaacctctctcccactcagctatgctagggcttggctgtaggtgtgcactgtctatttacatccgtccttacaaccatccttgtcctccttggtaccgtatcaagctctttcccatgacatttggtt

SEQ ID NO: 4672 - DNA, 2425 bp, Homo sapiens
gaaacagtagaaaaggccgaggctccattaataactgagagtgcttttgatgctggttttgagaaacttcttaaagaaataactgaagctcctccttatcagccccaggtgtcagtgagagaagaaactcacgagaaggagtcctcacagtcagagcagaccaggttcttggggacagtgccccatttttacagggcagcctcacagacctctgaaatgaaggataaaagtaatggtttggaatctcaagtcaaccaatgtgataaaatgttgggaggagacgcacttgtgactgatttattggtagatttttgtggttccagaagtggagttgagatccctagaaccccacaactttatgtggctcatgaaatagggaccattaaaactgtaacccccccagaggacagggacagtgaaagtggggttgtagggggacaagggactcttcaggaacctggctttggagaggcttctgaagcaattagtgtgtccagaaataggcaacccattcctctcctgatgaacaaagaaaactctacaaaaacaagtaaagttgaattgactctagcatcgccatatatgaaacaagagaaagaggaagaaaaagaaggtttctctgagtctgatttttcagatggaaacaccagttctaatgcagagagctggagaaatccttccagttcagaagaagaacccagtcctgttttgaaaactttggaaaggagtgccgctaggaaaatgccttccaaaagtctagaagacatttcatcagattcatcaaatcaagcaaaagtagataatcagccagaagaattagtgcgtagtgctgaagatgatgagaaaccagatcagaagccagttacaaatgaatgcgtaccaagaatttccacagtgcctacacaacctgataatccattttctcaccctgacaaactcaaaaggatgagcaagtctgttccagcatttctccaagatgaggtgagtggcagtgtgatgagtgtttatagtggagactttggcaatctggaagttaaaggaaatattcagtttgcaattgaatatgtggagtcactgaaggagttgcatgtttttgtggcccagtgtaaggacttagcagcagtggatgtaaaaaaacagcgttcagacccatatgtaaaggcctatttgctaccagacaaaggcaaaatgggcaagaagaaaacactcgtagtgaagaaaaccttgaatcctgtgtataacgaaatactgcggtataaaattgaaaaacaaatcttaaagacacagaaattgaacctgtccatttggcatcgggatacatttaagcgcaatagtttcctaggggaggtggaacttgatttggaaacatgggactgggataacaaacagaataaacaattgagatggtaccctctgaagcggaagacagcaccagttgcccttgaagcagaaaacagaggtgaaatgaaactagctctccagtatgtcccagagccagtccctggtaaaaagcttcctacaactggagaagtgcacatctgggtgaaggaatgccttgatctaccactgctaaggggaagtcatctaaattcttttgttaaatgtaccatccttccagatacaagtaggaaaagtcgccagaagacaagagctgtagggaaaaccaccaaccctatcttcaaccacactatggtgtatgatgggttcaggcctgaagatctgatggaagcctgtgtagagcttactgtctgggaccattacaaattaaccaaccaatttttgggaggccttcgtattggctttggaacaggtaaaagttatgggactgaagtggactggatggactctacttcagaggaagttgctctctgggagaagatggtaaactcccccaatacttggattgaagcaacactgcctctcagaatgcttttgattgccaagatttccaaatgagcccaaattccactggctcctccactgaaaactactaaaccggtggaatctgatcttgaaaatctgagtaggtggacaaatatcctcactttctatctattgcacctaaggaatactacacagcatgtaaaagtcaatctgcatgtgcttctttgattacaaggcccaagggatttaaatataacaaaatgtgtaatttgtgactctaatattaaataagatatttgaacaagctaggaaaattgaatttctgctgctgcttcaaagaaaaagctgccccagagcattaaacatggggtattgttaagaagcaaaatgttcttgtttgccatcatgtgtttcacaccacaattctgtgccacagttaagagggtctggtacccttgcaggacctttgtaggttgtgggaaaaagtcgcagaaagatactcaaagtggagcagggaatggagacagacatcagtgatgat

SEQ ID NO: 4673 - DNA, 2194 bp, Homo sapiens
gagggagtgtggaagtatcccaggaacagagactgtcccaattggaggccccagagagggaactggggcttgtccttggggccactgctactgctggggcttggggaggaggcctgagggcaaccctgaagccgtggagcagatggcctgtgtggcagtggctgtcagattggagggcagaatggaatctgatgtggctccagcttctttgaaggctgagtgcacatctggccagctgctggtgatggggaagggggtcactgctctattgagctatgtgtgactcacccttttccctagtatcctgtccttgtgctatgtcaggaaacctcctccccagccccaccgagtcttcaaaggagttggtcccccaggagcttttgtcctggggatttcccatccgcactgggagcactgtgggtagatgggcattccaagttcctgcccagacagaagccatgggcatggagacctggacctttcagcttggaaaagggagactgaggctgagtggacacaggacacacacacactctcagggtcacccttggggcagcaaagtggagcatcttggctccccatttaatgagtgacccaactggtgactcattaacatcccagagcacaatgaaaggcatgggggcggggcagccctccggctctgtccctcatcccttgcccaggcatctgggtttcctgcagattctcagctcagctgctgctttttctcactggaaaagggctcccagggctatgtgggatcagggctgaccactctataaactgatgaggaccccaggtctggccaagtgaccctgttttaccttcgttcaggaagagctgaggcctactgtgtactaggcacgggagatatagtggcaaccagattggctagcttttctgtcctggaggccacagcctacttaggagcagaaatagttatgaaataaacacacaaataagtggaagtgttggctggccgatgcaggaaatcaataaggtggtctggtggtgacttgctgggaatgcttctttgagtagggaggtaacagaggcctctgagaggctggcagctctgagtcaagtctgggattcctggactgtgggctctcttgcccccatctccaggggacttgtggcagccagagagctgagggtggttgttggggaggaaggccttgggcttcaagaccaccctgtctgtgcaatcctcacaggcccaccgtggtgcacgcaaaccacttcctggccatgcgctccctcctgcttctcagcgccttctgcctcctggaggcggccctggccgccgaggtgaagaaacctgcagccgcagcagctcctggcactgcggagaagttgagccccaaggcggccacgcttgccgagcgcagcgccggcctggccttcagcttgtaccaggccatggccaaggaccaggcagtggagaacatcctggtgtcacccgtggtggtggcctcgtcgctggggctcgtgtcgctgggcggcaaggcgaccacggcgtcgcaggccaaggcagtgctgagcgccgagcagctgcgcgacgaggaggtgcacgccggcctgggcgagctgctgcgctcactcagcaactcgacggcgcgcaacgtgacctggaagctgggcagccgactgtacggacccagctcagtgagcttcgctgatgacttcgtgcgcagcagcaagcagcactacaactgcgagcactccaagatcaacttccgcgacaagcgcagcgcgctgcagtccatcaacgagtgggccgcgcagaccaccgacggcaagctgcccgaggtcaccaaggacgtggagcgcacggacggcgccctgctagtcaacgccatgttcttcaagcgtgagtcgggggcgcgttcaggggtcctcctcctcctcccaggaccccctgcaagagttaggacgacattccgtgcgctccattcttcactgcctctcatttatgctgtgacaacccagggaggcaggactgtcactcagctttttgtacagactggaaactagattcagagacaggtagcagcgtgtaaaggaatggttcagggagcggaggccccagagggactccatggaatgtattccgaccgaatttcgtcaaagtgctcgtccttgtgtatcttggaatgaataacatttaataatccattctgcctcagtagtg

SEQ ID NO: 4674 - DNA, 2876 bp, Homo sapiens
aaagggccagcggggcacgtggctcgggacgcagttcgctgccgcccggcagtagctctcaggttaggcgggtcccgctccgcttccgccgtcgctgccgcgccgccccgggcccgacaggccgggtccagggactgcaacccagcgagggacgcgggcagccatggccgaagcggcgcctgcccgggaccccgagacagacaagcacacagaggaccagagtccttcgacacccttgccccagccagctgctgagaagaactcgtacctctactccacggaaatcacactgtggacggtggtggccgccattcaggccttggagaagaaggtggattcttgcctgacccgcttgctgactctggaggggcgcacggggacagccgagaagaagctggccgactgcgagaagacagctgtggagttcgggaaccagctggagggcaagtgggccgtgctggggaccttgctgcaggagtacgggctgctgcagaggcggctggagaatgtggagaacttgctgcgcaacaggaacttctggatcttgcggctgcccccgggcagcaagggggaggcccccaaggtgcccgtgaccttcgatgatgtggccgtgtatttctctgagctggagtggggcaagctggaggactggcagaaggagctctacaagcacgtgatgaggggcaactacgagacgctggtctccctggattatgcaatctccaaaccagacatcctcacccggatagagaggggagaggagccttgtcttgaccggtggggccaggagaaggggaatgaagtagaggtgggacgtccaaggatgatgggcactggcctccctccgtatccagagcacctcaccagcccacttagccctgcccaggaggagctgaaagaagggcaggcccccaagcagcagcaggactcagaggcgagagtggccccagccgggccagaagcaggactggcattgcggactgacctccagggagaggcccagatctgatctgcagagatctcccttccggctatcgtggctgctgttcaggtggtggagaagaagatggaaccccaggctgcctggctacagagcctggagggatgcatgtggacagccaagaagaagctggctgactgcgagaaggtggctgtggagttcgggaaccagctggaggccagcccaccaccaagccagatctggcaccagtggagaaaggagacaggcaggcaactgcagcctgcccagtgcggagaggggccagagcccgggcactgatttctccaggagagagctttgtttacccccaaggactgggcttcactcctaaaagctgcttctaaaccctttgcgtgcaggccccagacagtgtgggtgcatgactgctttatctgttggatgtttccacaggcaggctgttgctgccagaattctagaagcagtgtaaacgggctgctcattcattagggccctggttaatggtggagccagcctggtgtgtggcagccaggtcgggctggtgtcttcagagtggctgtgtcagaagggcctcgtgtatgacagaaacgcaggccagctggaacgtccccaggcgttctgtcctggatcaagcaagaggaaggggcaagtgggaggagccagcagggcccacaggagaccactgtggcacacctgtgctcaggcagcatggtgctgggcgctgcaggggctcattaatgcatgagacacagattccactcaggagagagaagacgaacacagacacagtacacggtgggaaggggcacttccatgtctgcagccagagagccctttcagaatctgacccaaaagatggccagtattctaagaaaaagcacatatgcttacgatgtgcaaacagctgaaggtgttctttcaactatagtaaaaggggtgtctcggtggccacaggcggcccagatgaagagacctgtctgggccgcagagaggagtctggaggccccccgagccaggctgagccagccgctaggggcacggagcagtgcccaccttgcgcccagtgtggccagagcttcggccggaaggagctcagtgcgccgcaccagcgcgtgcatcgtggcccccggcctttcgctggtgctcagtgtcccaagagcttcacgcagcggaccacccccgccagccaccgtcgggcgcacgtggccgagtgcacctacacccgcgcccaatgcggcaagaccttcctccagcagtcgacgctcacacccactactgcgcgcacatcagggagaagccctacgagtgcgccaagctctttggccgcctgtccacgctgctggagcaccggcacatgcacacgggtgagcggcccttccagtgcacgcaatgtggctgctgcttcagccgcctgtccacgctgctggagcaccggcacacacacatcagcgagaagcccttccagtgtgcgcagtgcgacaagcgtttcacgcgtctggccaacctgaccgtgcaccagagagtgcacttgggcgagcgctccttccagtgcgcccagtacagcaggagattcatgcagaagcccggcttcctgcgtcatctgtgtggccactcgcaggagaagcactatccttgcagcccttgtggttcccatgatcagtggtgaaatatagtgattttcacctgtgcttccattctgaagttctggaaagaagtactggatggactgaagtccaggacaacgttccaaagaaaggcagagtccaggtaggcttggaggaccaagccctggatgagcactggagggcagaggcctcagtgtccagcactgtgccctgcacatggaaagcccctacgtttgtggaatgaatgaataataaaaatgttttcataagtg

SEQ ID NO: 4675 - DNA, 2262 bp, Homo sapiens
attcatcagcagtttccgtcagctcttcctgcaaaacacattcaagcccgaccatatgtcaccacccccactgctattcccaggtcccagccaccatcatgtctcacctggactattgcacgcacctcctacttggtctccccacttctgccccggccggggctggtgtgttctccacccagcaacacagcagtcagagggatcctcttacaacataagtcagatcacctcactctttgctcaaaatcctgcaatggctcccatctccttcagagtaaattccaaagccccatatctgcccactgccccccactctagaaccttccctcctgttgttcttcccctggttccctccattccagctacagggatctccttgctggctcctgagcttaccaggtatggtgctgcctcagggcctttgcacttgcagtgactgctgcccagtaagtttggtaaggttggtccccagacatccacaccgccctcttctgcacctcctgctcagatgtcactttctcaatgtggcttttgctatttaaaactgcacccctttaaattgtacccagtttaaaactgtaccccctaccctaccctcctgatggagtttggatatttgtcccctccaaatctcatgttgaaatgtgatccctgtcaggtgtcatggttcacgcctgtaattccagcactttgggagaccgaggcaggcagatcacctgaggttaggagttcaagaccagcttggccaacagggtgaaactccatctctactaaaaatacaaaaattagctgggtgtagtggcaggcgcctgtgatcccagctactcaggaggctgaggcaggaggattgcttgaactcgggaggtggaggttgcagtgagccgagatcgcgccactgcactccaggctgggagacaagagcaaaaactctgtctcaaaaaaaaaaaaaaaaaaagcaagaaccagcccagggctgagttatgaagaggggtgctgcagactaggccaggtccccaaccttgtcaggtctgcaatgccaagcttccagacctgatcacaaaggagtgggactccaagaagagcgcgatgggatgtctgggtgaatgcacagtctccacctgtggttccccagatttacctggaccctctgggcctgcagaattgcccaagtcctccctcagaggataacaggctctctccttgcctaaagatgataccgcggccttcaacgtggaagaccaaacatcctgccctccgaatccacctataacctgtgccgcccaccagattcatcactggggttaagtcacaaccacacccacctggggacatgctgggccagccagggaggacaagactacaccccaaaggagctatggacccagccagcacggagcagtgggggtgggacagtgctcttgggaccggatcaagggcaggaggagctcatgaaatgggggacttctcccattgttatggactcaattgtattccccaaaaaaattcatagatggaagctctaacctccaatgtgactgtatttggagatagggcctataaggacgtgattaaggtgaaatgaggtcatcagggtgagaccctaacctgataaggctgttatacttagaaaacaaggaaaagacaccagatctcattctctctctctctctctccctccctccctcttccttccctcccccttcctcctgccttacatgcacagaggaaaggctatatgaggacacagggagaagagagccatctacaagccaagaagcgagccctctccagaaaccgatcctgctggtaccttgatcttggacttccagcctccagaaccaggagaaaataaatgtctgctgtttaagccgctcagtctgtggtttcttcttatggcagcccgagatgactaacacaccagtcatgccggatttaacagcaggagacagtgctaacgcactgctgaagtggctcttgaaacttggagaaagatggcagatgacagaagaagggatcaaaagacagagaagtgggcatggaccagagcaggcagaaaacccactgggtgacagcgttccacaagacaccaccaaggacgtcccactgacccagcaccggcttcaccaggtagctcagggatggggctgtccgccataggccagggtgggtggtgggaggtgccgttacagaaccaggtttgctgagagagctgggaataagagagagagagaaagaaagaaagaaagagagaaagaaagaaag

SEQ ID NO: 4676 - DNA, 4486 bp, Homo sapiens
ataaaaataaaaaaaaataacagccacaaactagggagaacgaaaaacagacacttcccacaagagggcatggggatggccagttcaagccatcaggctcattagcaattagagaaatgcaattaaaccacaatttaaaagccaaaagctccacacccttagaatggccgaaattaaaaagatggacggacgccagcaagtgttgggaaagacgcggagcccgctgcacatgagggtgtggggggcaccatggcccctgccgccgtctctccagctgccctccctccctgcctccctccctctgtgtccacctgctcctcttccagttccctctgcctggctgtttcctctagtgaatgctcactcagctggcaggtcctggcttagcaaagctcacaggcattcggctctgcatctgcctgcggctctgaccctgtctttgtggccctctcaccagccagctgccccccttgactctgagctcccagagggcagggaagcctctgcctgggcacgtctttgtacgtacagcacctaacatgggcctggcgcttaggagggcccaggaggcacctgagtaagggcaccagtcacctgctgctacagcagaagtgtttcctcctaacagttttgtgctgctctcctctttagggcatcttgacccagccgaaaaagttgaagatgctcaccccaagttatggtgtgctctgagcgaaggcaaggtgaccgtgttcaatgcttcttcatggaccatccaccagcactcctttaaagtgggcactgcaaaagtgaactgcatggtgatggccgaccagaaccaggtgtgggttggctcggaagactccgtcatctacatcatcaacgtccacagcatgtcctgcaacaagcagctcacagcccactgctccagtgtcacggatttgattgtgcaggacggacaggaggcacccagcaacgtgtactcgtgcagcatggacggcatggtgctggtgtggaatgtgagcacactgcaggtgaccagccgcttccagctgccgcgaggtggcctgacgtccatcagactgcacggcggccgcctgtggtgctgcacaggtaacagcatcatggtcatgaaaatgaatggatccctccatcaagaattgaagattgaggagaacttcaaagacaccagtacctccttcctggccttccagctccttcctgaggaggagcagctgtgggcggcctgtgcaggacgcagcgaggtttacatctggagcctgaaggacctggcccagcccccgcagagggtgcccctcgaggactgctctgagatcaactgcatgatccgggtgaagaagcaggtagggtggagggcccgccatccccagcatccccggcaggtctcgcttgccctggccgcatccccatgctcccgagagccagccgcacgccctcgtgccctcctgccttcgcctctcagggttcccctcctaacaggcacgtgcagggttggtgccaacgggcccacaggtcaccatgtgctggtttcatggtgtggtccaagcactccacagcgcattcccccaaactggatggcttcaaatgacagaacttaattttctcacagttctcgacgctggaggtccaaaaccaaggtgtcggcagagccgcttccctcgggggctcggggggagcgtgcactccaggcccttctctcccccacccgctcatgtggccgccgtccttggcgtgccctggctgtggacgtggcactctaacctgtgcctgcaccacatggcactctctctccctgtgtgtgtctcttatggggatgctggtcgtactggattaaccagtgtgaccacatctgaactatctgcagactctacttccaaagaagctcacattctgaggttcagaggatatggatttggggggacactgttcaacccattacagtctgccctctggccccctaaatccacatctgttccacatgcaaaatacaccccctccatcactacatcccccgaagtcccagtccctccagtgtcagttctgagccccaaatctccaagtgaagccaaagccctccgatgtgggtgagccgtgggcgggtcccacctggggcagaaccaacccctcttgcaccgtgaacctgcgcagctagaacaggctgtctcttcccaaaacacaaggctgggccaggcagaggttagacattctcatccgaaaagggagaaattggaaggaaagctggacttccaggccccgagcaagtcggagacacggcgggggtggggcggaattcgtttagtgttttcccccataacttaattggggtataattgatgaataaaaattatatatatctaaggtatacaaggtgatatttcagtatacattgtgaaataatcacaagctaattaccatatctgtcacctcacacaggtggctgttgtttggtgagaacacttaagatgcaccccagcacttttccagcacgcagtgcagtcttcttccccagaggcccctcggccattaggttctaagcccgagaagggtcctgtgcacctgccaggcggccctgaccctcaggcggcagaggccctgtccaggaaggacatagatttggaggcacacgcgtcaattctgggtagccgggcaaagccctggtgctcttgggaggggcttctttccctgctgacccctcccgtttctccctggcaggtctgggtgggcagccgagggctggggcagggaacacccaaggggaaaatctacgtgattgacgccgagaggaagaccgtggagaaggagctggtggcgcacatggacaccgtgaggacgctgtgctcggctgaggacagatacgtgctgagtgggtcgggcagggaggaggggaaagtcgccatttggaaaggcgaataaacgtggctgagtctgccaagtggaactgtgccctatgtgtggggactggctgccccctagagcctgccaggagcagaagcctggaggggtggcagggcagagcagcccaggctcagcatggagcccacttaccgtgtggccagccgcgagacccatggccacgcaccttctctcaggccttcgggccccctggttaaactgcaccaagggtgtttcctgttggggtgtgtctcaggcaggcagctgcgtcttgttggtgataacctctgctgggaggttactttgttgcctagaaagttctggaatccacaaccaggggctggcactggagccagcagcttggccgagtcacaggtgacccgtggccctcacgtctctggttttacctttccttacttcattcattcactcacccagtccttacgaatcaccgaggaacactgggctgagcacatgacagggagcctggagccccggggcctccagcgaggcctgagaagggtggttcgggtaaccactgtgggctctctcccatcacagaaggtggacagggcctacccaggtggaggggaccaccctgcgatcaggtgtttgcgacaggggttgggccagctgaggcaagctgtcttttttcccttttctttttaatagatgcaacatttttataataatcctagagaccttttttctaccaaagatcacagaccagaaaaagttccatctaaaatatcatgcccaggaaagcacatgggatcaaaagtaaaatagcatcatgtgtgatctcgtcttccagcgtgccgctcagttccccgaatccgtgtgcacacgtgtgatctcgtcttcagtgtgccgctcagttccctgaatccgtgtgcacactgcgtatgtgtacgcgcagcatgctatactgaactcaacaagatcttggctgtacataatatttgtaaaagagaccctttgcacctttttactgtaatgttgagacttcattacttaaatgttctacggaaggttctggtgtggttgttggagccggagggagcgtgtcagcacgtgctgagggcatggggcctgccccctgggcacccatccacaagctgggccacggagctccagcttctcaggacaaagccccggggctggcgcatcctgagggtctctgggggtgtttgccaggctcctgggatgggccgctttcagaagccctgcagtgcctccagatggaaaggcgggcccggcctccggttgggtctgcattttggagagtccacaccacggaccaggttttcccccaaggcttggctttgtgtagctactaacttcttggggcattctgagagtgtgggcagagagaattatgtggcctcatcctcccccaaggctgtgcttgcagcccgggcaccttcccactttctagctctggagaggttggattttgcttttgtaaacacatgaatccttatgataaaagtctgtcagtcaaaaatacatttataaattatttaatgccagtcctcatgtaacctcaggtatcttcagcttgtggagaataaatctggtttaataaacactg

SEQ ID NO: 4677 - DNA, 3453 bp, Homo sapiens
agcaccttgctggcccacctggactgagaagcatcagagtcctggtaggggtaggcccagtagagcgcatggcccccgtgaccctcacagccagagttggcgcggtgggtgggaattgtaggtagatttcagccagctttagggagcagctgttttagggtcactgctgcccagccatggagtgagctctgtgtcactgggggtatgcaagcagggacaggagacgtacttgtcaaggatatggtagcaggaagtctgggttagactggaagacctcctttctgtgcggatctgattccagcaggaagccacggccaggtggccgagggccatgctgggcacccaagcagccctgactggtgctgtgggcgggcaggccctcaacatatccttcctggaagaggacattaacgctcgtgatgtttccacacctaccctcacgggaccccagggagtggcggctgggtggggaggctcacgacagcatcatccttcccacattctgagtggcccctgagccctgattcttcttttccagcgataagttcacacggttttgccagtggaagaatgtggagctcaacatccacgtgagtgggcttgggtggggcatggaaagccacgcaccctgctgctcctctcccgggagctgggcctgtggcttggctgggagggggaggtcaggggatgtctgtcctttagcccccagggccgtggctatgggggtcagggccgggatcccagcatggggaggccggagcaggtaaatatgtggcaaggatggccaggacatgggtatggggaccctggcatggggccagcccctgctgcccaggtgcctctgccccagggctgggcagaggcagcctgtggtgaccgcagctgtcgctgcccctcagctgaccatgaatgacttcagcgtgcatcgcatcattgggcgcgggggctttggcgaggtctatgggtgccggaaggctgacacaggcaagatgtacgccatgaagtgcctggacaaaaagcgcatcaagatgaagcagggggagaccctggccctgaacgagcgcatcatgctctcgctcgtcagcactggggactgcccattcattgtctgcatgtcatacgcgttccacacgccagacaagctcagcttcatcctggacctcatgaacggtggggacctgcactaccacctctcccagcacggggtcttctcagaggctgacatgcgcttctatgcggccgagatcatcctgggcctggagcacatgcacaaccgcttcgtggtctaccgggacctgaaggtgagcgcccctgctgtccccaggctggacctccgtggctgtcctctccttcctctcgacatcccggccaccaggcccagaggagtggggctcctgggacatggccgccccgtatcttcccatctccgcccctgcccttcccaccgagccactctctgggtccaggttgtagctggggacaggagagaggacccccacctttgccctttctttgggtacccatcgtcctctccagtgaagcagtgacccagctggcatcttgcctggctgggccccatcctgagctgccccaggcagctcactgggcttccttcacagccagccaacatccttctggacgagcatggccacgtgcggatctcggacctgggcctggcctgtgacttctccaagaagaagccccatgccagcgtgtgagtgccccccaccctctccctccccaccccttgccactcccgcttatggcccccttgctcccacaggggcacccgcgggtacatggctccggaggtcctgcagaagggcgtggcctacgacagcagtgccgactggttctctctggggtgcatgctcttcaagttgctgcgggggcacagccctttccggcagcacaagaccaaagacaagcatgagatcgaccgcatgacgctgacgatggccgtggagctgcccgactccttctcccctgaactacgctccctgctggaggggttgctgcagagggatgtcaaccggagattgggctgcctgggccgagggtgagtaccctggcgccttgggcatgctgctggctgtgcccccatgaggacaagggctgtgtcccgtcacctggaaccccctccaaggtcccagcctccttggaggagctcataagttggggcatggccagccctgtccaatgttctcagagtggaggggctgccctgggagttggagctgctggaaccagctagtaactggcttccagaggggcccttgtcacagatgatgatgatagcagctttttatgtttatcaaacatttattaagcactgggcatagggttgcaaaatttaccagtgttaaaacccacaaccctacgatgtaggaacttctgttctcccatttgagagatgaggaaacagctcaggcttaaggaacttgcccaagttcacagagccagaaagtggctcaatcaggagttaagcccgggactcagggtggggctgagcccagatgactggcctctccccacagggctcaggaggtgaaagagagcccctttttccgctccctggactggcagatggtcttcttgcagaaggtaacagtctgcggcagggactgggggtgctctgcagccccacccccgagctaatgcccatgacccctgttctgctgcagtaccctcccccgctgatccccccacgaggggaggtgaacgcggccgacgccttcgacattggctccttcgatgaggaggacacaaaaggaatcaaggtactgggccttgcctggcctcttgtacctaggctgtgatcctggcctggggaaggatccctctcccttcttatcacctgtgagaccctgtgccagccctgccagcttgtaggcctcagttcctccttggccaacttccctggggggtggcagttgcactgaccatccctacccagggccctgggtctgggcagcctgtggctgatggtattccggcatctctgtccacccatgtgcccctgccccatccacctggtaaagttactggacagtgatcaggagctctaccgtaacttccccctcaccatctcggagcggtggcagcaggaggtggcagagactgtcttcgacaccatcaacgctgagacagaccggctggaggctcgcaagaaagccaagaacaagcagctgggccatgaggaaggtgagggtcgccggctgctgcggcaccaggcccctgcctgcttagaagtgagcagctggctcgggtttaaggaactcaccctggatcacagccagaaagtggcggctctgggattcaaactcaggctggggccgggcatggtggctcacgcctgtaatcccagcactttgggaggccaaggagcgcagatcacttgaggtcaggagtttgagaccagcctggccaacatggtgaaaccctgtctctacc

SEQ ID NO: 4678 - DNA, 3535 bp, Homo sapiens
tatgggagccagaagcagggcttgtcccactcatagctttctttcctccctcagctcaatgtacttctccagttcctacccttcctcaagtggggaactcaggagaccaagcaggggcaactgtacttcggatggtcaggccccaggtgagcttggttctttgtgtttttaccaagtccccatgagtctggtccaagaatggctagaggtctcacccccaggactctgccccatctaagactattcctgtggctctcctgcctcattgcttcccctggaggtaatggactctatcttgcactggactttcgaggtgttatctcagctcctctctcccatacttttgcccacgaagaggccataccctgtgccctctgtacccttgatgactctgcccttcagggtgtgaatgttcctgagcaatcggagcttgtcattccaggatactgtggcgtatgaggacctgtctgaggactatactcagaagaaatggaaaggtctcgcactcagtcagagagccctgcactggaacatgatgctggaaaatgaccgtagcatggcttctttgggtaatgattctgtttcctagtcacttagagtctgcatgctgccattctcttttttatattccttttctttttaaactttttactacgaaaatttccaaacggagataagctagagtgaataagagtcagtgtgtatggagctgcctgggtcctcttgaataggaccttctctgcattcagcttgaacaatgatcagcattctcttcacctcattattgattgacataaggtggtttaggtagagtttttttagttgtaaggaatagagagccactcaagttattgtaagtaaggagctgtgagtcataggcttaaaggaatgagaacccagaagaaactgatcgctagaccagactgtgggaagtagggccttgactcagggcagcctgggagcctgaacagcaaaagcaaatgcatgttgatgcctgtgttctggtgtgaatgtaatgcagctgctcgcagtgtatctgttttctctctgcttgtactcctcctgctgcccattttcttcactgtgaatcttttgtccttttcgtagctctttcctaattgtacttcctgttcccttatatttgttgcttgctgtgtctcctaatggcttggcttctcaccatgtatcacttcagattccattaccactcgtaattttgccctacttccagttccgaatttccttagagacagattcccattgctatagccattactcatcatctcggttgggcagagctttggcccaggccatggcagaggctgaagactaacctacagataagctgcccttgggtctggtacctggtactggtccaatcacttgcagtccatcatgggatgatgttcaggatcacttgccacagagcatggttgcctaagtgttgctctctgcaaagactggggcagtgcagtttcctggaagggcttcttggcagtgcaggtgctatgattgatgcatatagggcagtagccaactctggaaagggtgggcttaggaatctttcacccagacatcttaaactttccataggctaactgacatgatggctgtagccccaattcagatgtgattgaaaggaacccacattttggtgtttttccatggccatgattactctgccttctcccagattttgtattcagaattccaaaaggcaaatatttacctgatcatttcctttatattctagataatcaaaggcattttaatttatatttcaaatgattgatgtccctgttatcttttctgggagtgcacaactggctcctaccgggccagtgctctgagggccagtggcatccccacttttagaactctgctgtctccttcaatactgctgtccagcttttctcaactgatagcttctccaaatcttgttactgtcctgtcatacaacatctctcctttttgtacgctttcctaatcatacactcatagtagaaatttctcaactcattcccatcttttccttgtctctttcttatatttgacttgaggtatttgccagccttccctctcccaacatcttttctgagaaccatggaaccatataatgtcatggttggaagggaactcaaagtttaccattttgctaaagagacatagtgtgagagtgacttatataagatcacagcatgctttgcaatccagtctcttgctttccagtgacccttctgacttggctgtgctggctcaatatcttttttccaccctcctccactgaccgtcttcttcttccttgtttttctatccctaagatacaattgagcattttgctcttgttctcaatgtgtcatctcatttcttaaccataatgtgactttttttcaggtacattagctctttatgattctgtttcttcaacaggaaaagaaatgagtaaaagttgttgtcttattttttttggcagcaggtaggaacatgatggagagttcagagctgactccgaagcaggaaatttttaaaggatcagagtcatctaatagcacatcagggggactctttggggtggttcctgggggaacagagactggagatgtttgtgaagataccttcaaagagttagaaggacaaccctcaaatgaagaagggagcagactagaaagtgatttcttggaaataatagatgaggataagaaaaaatccacaaaagacagatatgaggaatataaggaagttgaggaacatccacctctgtcttccagtcctgttgaacatgaaggagttttaaagggacagaaatcctatcgatgtgatgaatgtggcaaagctttttattggagttcgcacctcattggtcatcggagaatccacactggagagaaaccctatgagtgtaatgagtgtgggaagaccttcaggcaaacctcccagctcattgttcatctcagaacccacacaggggaaaagccctatgaatgcagtgagtgtggaaaggcctataggcacagctcccatctcattcaacaccagagactccataatggggagaaaccctataaatgtaatgaatgtgcaaaagcttttaatcagagctccaaactcttcgaccaccagagaacccatactggggagaaaccttatgaatgtaaggagtgtggggcggcctttagtcggagtaaaaatcttgttcgacatcagtttctgcacactggtaagaaaccttataagtgtaatgaatgtgggagagcattctgttccaatagaaatctcattgaccatcagagaacccacactggggagaagccttataaatgtaatgaatgtggcaaagccttcagtcggagtaaatgtcttattcgacatcagagcctccacactggggaaaagccatacaaatgtagtgaatgtgggaaagccttcaatcagatctctcaacttgttgaacatgagcgaattcatactggagaaaaaccatttaagtgtagtgagtgtggtaaggcattcggtctgagtaaatgtcttattcggc

SEQ ID NO: 4679 - DNA, 4208 bp, Homo sapiens
acaccagcgtctcctcacccgcaggctgagacttactgacacttttcaccctcttggccccacatgtgtggcccactggaggggagcaatggctggcagaaaaccaccaggtctggaggtcaggggctgggttctggcctggccctgcgtctggccaacacgtgatctggaactgttttgtgggcctcggttttccttccagaagcagagaatcattctccatttctgagtggggcaagggggctctgacctctcccctggggctgccttttccctttatttccaagcagtatcacaagggcccaccaaagtggcatctggaagtatgtgtttccaacaaatccagtcttttttttttcttttccccttattggcttaccatgatatggtagaaatttattcaggcctgcctttaaaattccccttgattgagtctttggtggatcttacaaagactttggtgagttgcagagtctctcagcatatcacctggatggaggtagaggggcagagggccacgatgggcaggattgggcctctgggagaacagaagggccaaggcaaagcagaaaggagcagggaggtcctcggcaggggagccatctggaagatgtcaacttgcaggccctgaggtctgccctgggctgagttcctgggtctcctactggagagatcagccaaaatacacctctgttcccccaagcactctttgctttctgccttctctctggtcttggaattttcagttcaattgggatcttacaggaaaacaattccaggccaattcctgacttcccaccctagaagggaatgttggagcccttggcctgtggttccctctccctccttcttgggagctggtcccggggggaaatggtgggaagttccatatttggatggcccagagtgctggaatgagatggagatctccagagcaggacaagagggtccttatttagtctgaagtctccaacctggggcttagggtgagagaggagctggcagagggatggaccctttaaaggcaagaggatggcagttgcaaggaaaggagctgagagcttctccgagggtggtaaaaggcgtggcttctccagtggtatccctcggtttctatgttcaggacatgtttgaggatgcgtccaactgagatgctgaactccaatatttaaggaatatgatcaaaccgaattaggattacaggacaagtaaagaaaaagaatgcagttgaatctcttgagaggagtatgtgaaagttagaagcaatgatctcttgaagctggggcctgtccctcccacttccttgtctcccgatggtactaactttatataatactaataagagtagccaacatttattatgcatttgttgtatgcagggtattatgccaagtacttcacatgtcagatctcatttgattctcaccaccagcttttggggcagacattattatgttcatttacaaatgaggacacagaggctggaaaggcaaaaaaaacttgcaaatggctggaaagggagagagctgggatttgattctgggcagtctgactcttcatgaccccaggctctgaactgctttaactttatttttatttttaaaagttttatttatttatttatttttaaataaatagagacagggttatgccatcttccccaggctgatctcaaactcctgggctcaagtaatcctccagccttggcttcccactgctggaactacaggcatgagccactgcacccagcccaaactgttttattctggatagctggacatagctcccctctgagattaacaggacgaaatatgaggcccacagcctttccagctcagaccattgcaatccctagttccttccgttccactctctcttaccccaggagtcaggaagttcttctgtgtctgaccctcacttcttcctgtggtaaagtgatttctgagattagaatcttcaaatcctcttgtgattagcatgagctgcatcccatttcaaagcccaccatgttgggcacttaataaatgttaaacatttcttatggggtatcacatcacctgcatctccccccattggctccctgccaacatgcacagatagtctcttctggattccactgttgaaggcaggaaaactgcccttcttttctttttcctcctcccccattgggacatatggtctctgttgagggcagagtgaggaacctcaacaggcgtcctgtggcttggggtcagcctaggctgttgcctctgaaccctgtgttgcactgcagcctgaggaagtttaggggtgcagaggaccaaaggagacacatatggattcctggaagaggaattggtgttggccagcatttctagagtcggatatgcagatcccatccctctgtcctcccacccattggccatcccacctgcctccatttgtagacagttcctgaaagatcaggatattatgtatgcaaagaggccagagagcttcagctgtaagaagcttgcaatgagcaagaaggtcaccccagcttcaactcaatgcgtccgcttccccttcccctccacagtggtctgcaagaagaatctggacagtaccactgtggccgtgcatggtgaggagatttactgcaagtcctgctacggcaagaagtatgggcccaaaggctatggctacgggcagggcgcaggcaccctcagcactgacaagggggagtcgctgggtatcaagcacgaggaagcccctggccacaggcccaccaccaaccccaatgcatccaaatttgcccagaagattggtggctccgagcgctgcccccgatgcagccaggcagtctatgctgcggagaaggtgattggtgctgggaagtcctggcataaggcctgctttcgatgtgccaagtgtggcaaaggccttgagtcaaccaccctggcagacaaggatggcgagatttactgcaaaggatgttatgctaaaaacttcgggcccaagggctttggttttgggcaaggagctggggccttggtccactctgagtgaggccaccatcacccaccacaccctgcccactcctgcgcttttcatcgccattccattcccagcagctttggagacctccaggattatttctctgtcagccctgccacatatcactaatgacttgaacttgggcatctggctccctttggtttgggggtctgcctgaggtcccaccccactaaagggctccccaggcctgggatctgacaccatcaccagtaggagacctcagtgttttgggtctaggtgagagcaggcccctctccccacacctcgccccacagagctctgttcttagcctcctgtgctgcgtgtccatcatcagctgaccaagacacctgaggacacatcttggcacccagaggagcagcagcaacaggctggagggagagggaagcaagaccaagatgaggaggggggaaggctgggttttttggatctcagagattctcctctgtgggaaagaggttgagcttcctggtgtccctcagagtaagcctgaggagtcccagcttagggagtcactattggaggcagagaggcatgcaggcagggtcctaggagcccctgcttctccaggcctcttgcctttgagtctttgtggaatggatagcctcccactaggactgggaggagaataacccaggtcttaaggaccccaaagtcaggatgttgtttgatcttctcaaacatctagttccctgcttgatgggaggatcctaatgaaatacctgaaacatatattggcatttatcaatggctcaaatcttcatttatctctggccttaaccctggctcctgaggctgcggccagcagagcccaggccagggctctgttcttgccacacctgcttgatcctcagatgtggagggaggtaggcactgcctcagtcttcatccaaacacctttccctttgccctgagacctcagaatcttccctttaacccaagaccctgcctcttccactccacccttctccagggacccttagatcacatcactccacccctgccaggccccaggttaggaatagtggtgggaggaaggggaaagggctgggcctcaccgctcccagcaactgaaaggacaacactatctggagccacccactgaaagggctgcaggcatgggctgtacccaagctgatttctcatctggtcaataaagctgtttagaccag

SEQ ID NO: 4680 - DNA, 4201 bp, Homo sapiens
tatattattcattactcagatgatattctttgtgcagcaccttcacgctctgtattaatatcttgtttttctgcattacagcaagtggtcacagcagctggcttggttatcgccccagaaaaaattcacacttcatctccttatcactatttagagatgcagctagaggataaggtcattaagcctcaaaaagttcaactcagacgagactctttaaaaactctaaatgatttccaaaaattatttggagatattaattggattcgtccctccctacgcattcctacttatgctgtgtctaatctttttgcaatattacggggcaatcctgatttacgcagtaaaaggtctttgactcctgaggcagattctaaattacgacttataaaaaaatgcattcaacagtctcaggttaccagagtaaatccacatttaccttttgaagtactaatttttcccactgaacattcaccaacaggactcattattcagggacataatttaattgaattgtgttttctcccacacagctctttacgtacactaactatctagatcaaatttctaccttaattggtcaggctcgttctcgtctccttcgtctttcaggaacagagcctcaaaaaatcgttgttccccttacccgattacaagttcaacaggctttgctacttgcattgcttggcaagtgcatttggcacgtttcccaggtataattgataatcactatcctcatgtaaaattatttcagttccttaaactcacgtcttggattttacgtaacattactagaaacaccccattacctgaagctgtcactgttttcactgatgcttcctctaatggccgagcagcatatacaggacccagagaacgtgttcttaacacaggggctatttcagcacaacgagctgaactgcctgctgttatggctgtccttgaagattttcctgagccagttaacattttctctgactcagcgtatgtcgtacatgttgctcgcaacattgaaactgccttaatcaaatttctgcctgatgataacctattccttctttttcaaaagtttcagtctgtgctcagagcaaggtcttctcctttctacagtactcacattcgggcccacacacccctccccggacccctctcggcagcaaatgccagagctgatacattagttactcccgtttttacagatgcagaaaattttcatgctttaactcacgtcaatgctgcgggactccgaaacaagttcccccttacatggaagcaagctaaaactactgtgcgtcactgtcctacttgtcaagtgttaattttaccaccactgtcttcaggagttaaccctagaggactttcacagaatgctctttggcaaatggatgtgactcattatcctccttttggcaagctttcttttatacatgtaactattgataccttttctcattttatttgggccacttgtgaaacgggcgaaagtacagctcatggtaaacgacatgtgccttcctgtttctcggttatgggctgttctgagaaactaaaaactgataacggccccgcctacactagtgctgcttttaaaaagtttcttcagacatgggcaattactcacacaacgggcattccctataactctggagaacaggccttggttgaacgagccaataaaacactcaaagatcaacttcgtaaacaggatactaaatcaaagggagatgctattactcctcatgcccaattaagtctggctcttttcacactaaatttcttaaacttaacaagaaatcaacctttcacagccgcagaacaacatttcactggaaataaatttgatccacaaaaaggaatgcgggtatggtggaaggacgtaaaaactaacacatgggaattaggcacggtcataacttggggtaggggttttgtttgtgtttccccaggaaaagaactacagcctgtgtgggtcccctcccgacaattaaaattgcaccataactccaaagatgaaacgctcccagaaggaaaaggcaaagacccatcggaaacaaaagagcaactttcaccgcctgatacatacacttcatgacatccacattgagacaaaatctcgccgtgtgacctacaacacctctcgttcaaccccacctacttggggtcgaatacagattttatctcatcaaacagaaaaattcttaacagaaaaaggaatcccaaaaatgactggtaatataattctggctgcctttatggtagtcagtgcagcggtaagtataccaccggtcggggcaactcaaaattatacttattgggcatatgttccttttccccttctaattcggtctgtctcctggagggactctccagtagaagtttacactaataatagtgcattcatgccgatccctaatgatgatcggtttccagctcaaccggaagaagaaggtatgcactttaatctgtcaattggctataaatatccaccattatgtattgggaagtcgcctggttgtttagcttattcttaacagaattggatgtggactgtaccgtcctttacaaatgattcttatcaagtatataatgtgttcagtactaactcttttcaacttctcactgtcaaacgtaccccacatgaggcatggagagttcctctcactaccaaaactaataaaacaaaaggactgccggactgtccaaagaaacctacaaatgggccttttatagtgacttcaattttatgggataattgtaatgctcccaaggctgttgtactccaaactctagccatgggtattgttattgattgggctccaaaaggacattattggcaagattgctccagcaaaaataccttatgctcggagtttatttattccttagattatatagagcatgggtggcagtcttacacgatgagacaacgggtgtctccttacccatttaaatggatggacacaggtattgctcctcctagaccaaaaattattcatcccttttttaccccagaacatcctgaactatggaaattagctgcagctttgtcgggaataaagatatggaacactacctatcagctccttcgtactaaaaccaaaacacccacattcaacatcacccttatttctgaatgggtgatacccattaggagctgtgtcaaacccccttacatgctgttggttggaaatataattatgatgcctgatgcacaaactatagaatgtcataactgtaagctgttcacttgcattgatgcaacttttaatcccactacaagtattctcttggtaagggctagggagggggtatggataccagtttctctacatcgtccatgggagtcttccccctctattcacatagtcaatgaagttcttaaagacatcctcaaaagaacaaagagatttatttttactcttattgcagtccttgcaggactacttgcggttactgcaacagcagcaactgctggagttgccatccgcagttctgttcaaactgctcactatgttgaagcatgccagaaaaattcctccagactttggaattctcaggcgcaaattgatcaaaaattagctaatcagattaatgatctccgccaaagtgtaacctggctgggagatagagttatgaacttgcaacaccgtatgcaattacagtgtgattggaatacttctgattattgcataacgccttatgcttataatcaagatcaacatagctgggaaaatgtctcaagacatttaaaagcctgggatgataacttaaccttggatatttcacaacttaaagagcaaatctttgaggcttcacaagtccatttatccacagttcctggctcacacatttttgaaggcataactaaacaattacctgattttaatcccttcaaatggctcaaacccgtcagaggatcattgttgttactggcattattaatattggtatgcttatgttgtctccttttagtctgcagatgcctctaaggagtccgaaaccaagtccgaagtcaacaacaagcaatgatggcgatggcgattctagttaataaaaaggggggagatgtgggcggcaagccacccaggcaccgaggcaagagacagaggacacgagctgtaccagtataataaaatataaaacaagaatagttataccagatatagatcttagatatgattatatacgaatatcattaatcatg

SEQ ID NO: 4681 - DNA, 3847 bp, Homo sapiens
aggcccctgaccccaccccacccacagagcacgagggccccgtcagctcagtctgtgtcagccccgatggcctccgtgtgctgtctgccacctcctcgggccacctgggcttcctggacacgctgtcccgggtgtaccacatgctggctcgctcccacaccgccccggtgttggccctcgccatggagcagaggcggggacagctggccaccgtgtcccaggaccgtaccgtccgcatctggggcctggccaccctgcaacagcagtggggccgtgcgctccttcagcctggaggccgctgaggtcctggtggaacacacgtgccaccgaggagctgtcaccggcctgaccgccacccctgacggccgcctgctcttcagctcctgctcccagggctccctggcccagtacagctgtgcggacccccagtggcatgtcctccgagtggcagcggacatggtatgcccggatgcccccgcgagccccagcgccctggcagtcagcagggatggccgcctgctggcctttgtgggaccctccaggtgcacagtgacagtcatgggctcggcctcccttgatgagctgctgcgagttgacatcggcactctggacctggccagcagccgcctggactcagccatggctgtgtgctttggccctgcagctctgggccaactgctggtgtccacctcgtccaacagagtcgtggtgctggatgctgtgtcgggccgcatcatccgggagctgcccggtgtccaccctgagccctgcccctccttgacgctcagtgaggacgcccgcttcctgctgattgccgccggccggaccatcaaggtgtgggactacgccacacaggccagcccaggcccccaggtgtacatcggccactcggaacccgtgcaggctgtggccttctctcctgaccagcagcaggtcctcagcgcaggggacgccgtcttcctctgggatgtcctggccactactgagagcgaccaaagcttccccggggcccccccagcctgcaagacaggcccgggcgcaggaccgctggaggacgcagcgtccagggccagcgagctcccccggcagcaggtccccaagccatgtcaggcatctccaccacggctgggcgtctgtgccaggcctcccgaaggtggcgatggcgccagggacaccaggaattcgggggccccacgcaccacctacctggcttcctgcaaggccttcacgcttgccagggtcagctgcagcccccactctgccaagggcacttgcccgcctcccgccagcggtgggtggctgcgtctgaaggctgtcgtcggttacagcgggaatgggcgggccaacatggtctggaggccggacacaggtgggggccaagagcctacccccacccccagccaagatgcggccgcgcgtggtccagccgtctccaccccaaggccaggacctggtggcaaatgagcgccagccatcagtgtggggctctgttctcccggtagcgcctcctggcgctccagccgaggcttctttgcctacacgtgcggccgcctggtggtggtggaggacctgcactctggcgcccagcagcactggtccggccactctgcggagatctccacgctggccctcagccacagtgcccaggtcctggcctctgcctcgggccgaagcagcacgaccgcccattgtcagatccgcgtctgggacgtgtctggcggcctctgccagcatctcattttcccccatagcaccaccgtgctggccctggccttctcaccagatgacaggcttcttgtcacactgggggaccacgatggccgcaccctcgccctgtggggcacggccacctatgacctcgtgtcctccacccgcctcccggagccggtgcatggtgtggccttcaacccctgggacgccggtgagctcacctgtgtgggccagggcactgtcaccttctggctccttcagcagcgtggggcagacatcagccttcaggtgcgtcgagagccggtcccagaggcagtgggggctggagagctgacctcgctctgctacggggcacctcccctgctctattgtggcaccagctctggccaggtctgtgtctgggacacgcgtgccggccgctgcttcttgtcctgggaggcggatgacggtggcattgggctgttgctgttctcgggttctcgattggtcagcggcagcagcacggggcggctgcgcctgtgggccgtgggggctgtgtcggagctgaggtgcaagggctcaggcgccaggtccagttctgtgttcatggaacacgagctggtgctggacggggctgtggtgagtgccagcttcgatgacagcgtggacatgggcgtcgtgggcaccacggcgggcacgctgtggtttgtcagctgggccgagggcaccagcacacgtctcatcagtggccacaggagcaaggtgagggacttccagcctgggcggaggcggggcagccgaacctggtgccctccctgcctgccggctccatctccaccagcccagatgattccaagtcctgccgtcactggctcgcagcggccgccttggggttcccagcggggaagtcttgggtgtgcacgtcccctcaaagccgtcccggttgtgtctgcacaagcgagccgcctggcaggccttgcaggtgaacgaggtggtcttcagccccggggagtcccactgcgccacatgcagtgaggatgggagtgtgcgggtgtgggccttggccagcatggagcttgtgatccagttccaggtgctgaaccagagctgcctctgcctggcatggagccccccgtgctgtggccaccctgagcagcagcggctagcggctggctacggtgacggctccctgcgcatcttcagcgtctcccgcacggccatggagctcaagatgcacccccacccggtggcgctgaccactgttgccttctccaccgatggtcagactgtcctctctggagacaaggatgggctcgtggctgtgagccacccctgcacagggacaaccttccgtgtgctgagtgaccaccagggcgccccaatctctaccatctgtgtcacgtgcaaagagtgtgaagacttaggggtggagggcacagacctatggctggctgccagtggggaccagcgggtcagcgtctgggcctccgactggctgcggaaccactgtgagcttgtggactggttgagtttcccaatgcctgccaccacggagactcagggccacctgccaccctccctcgctgccttctgcccttgggatggggcgctcctgatgtacgtgggccccggtgtttacaaggaggtgatcatctacaacctctgccagaagcaggtggtggagaagataccactgcccttttttgccatgtccctgagcctgtcccccgggacccacctcctggctgttggctttgctgagtgcatgctgaggctggtagactgtgccatggggactgcccaagactttgccggccacgacaacgcagtgcacctgtgcaggtttacaccttccgccaggctgctcttcacggccgcccgcaacgagatccttgtgtgggaggtccccggcctctgagatgcagcagggactgtggtggtgggcatcacgcctggtcatgccaggcacctggacacaggcttggcagaggcgccaggttgtcaatggcctcatgctgggacaggccaggattcacgtaaatcgcctggagcaagctgttgtaaatttggcgccctgtgaatactttcatacctgttgcccttttgcctaagaaatctttaatgtttctatcttgtaataaacatgggcatttatttc

SEQ ID NO: 4682 - DNA, 3913 bp, Homo sapiens
acttattcctgcaaatgtgaattaatccttttcttactttgagcatgaccatataacttgctttggtccataggacattagcaagagagtgcaaaccaagacttcataagtacttgtgcattggagcttggctatctagaaagttccctttcgggagccagttactatgttgaaaagatgcttgggctgaatcatgagaggcaacatggagagaggcatggggaattaggagacccaccagctgaaccctgccagaatttctgagaaacagaattctgagaaataataaattgttgtttgggggtggtttgttatatggcaatggaagactgaaacaagctataacagccttcacaacaaactttcttctttctttaaacaaacaaactatgcattaacttagttctgattattcctttttaaactccttccctagttttcctcttattgtctcaacttcgtcttttctcatggaggtgtggatggctggtgctataagcattgtgagttgggagatactggcaagccctgcttaccaagaatcttttccttatcagcctgtcctggtacttgaaacttcaccattatataaataaggaaaattttctcctaaactaaagaattttcatctccaagaataaatatgcaactatccctggacacatacactattctttgtcattcaccattgagccaggattaatttgtaagtttgctttcctgggaaacagctaactgagaaggaacagaaagacttgcccacacattgacttctgattggtaggctcttcccctttttctctatccaaataactcctgctctttcttcagctctttttttttttgggagacggagtctcgctctgtcgcccaggctggagtgcagtggcagtggcgcgatctcggctcactgcaacctccgccgcccgggttcgagtgattctcctgcctcagcctcccgagtggggttaccgcaggcatgaaccaccatacctgcctagtttttgtgtttttagtagagacggggttttgccatgttgcccaggctggttttgaactcatggcctcaagtgatccatctgccttggcctcccaacgtgttggcatgagccaccatgcctggcctgttccttcagcttttaactccctgaaccctgtgattaggttaattttcccattataggctctgatagtaccaaaaaactcctctttgagcacttatcgcagtggcaattcaaccttttttatgtgtaattatatttatatctcctagaactgtaagctccaaagggtcagagaccttgtctgttttgaccactgtagtattcccaattcttcccatatacgctgacacacagaatgtactcaatatttgttaaatgaatgagtgaatgaatgaactgtgattctgaacaattaaattctctctttctttctttagaaattcttgtgcctggacttggtttttttattactattgggggcaagaaagcagtcacttggcattctaaaagctctatgagatgtttcaagaggaggaaattaaagctaagtgtgctatgcttgaaatgaagacttattagaccaatgtaggctcccttacaatgcctgacccatttcagttgtagcccatgaacaaaatcatttccagaagtgagaaaactaataagagctaacatgccttgtactagcaggcattgtaaaaacatcactggagcgccgtcaatattattcctgtttttccacaccataataatttatagcttccctttcttttataattaaataatttcagacgtgttaaggaagaaccataatggtttaatacactttgcagttctctgatttatcttcactgaagcctgtaataattaaacataaaaattatatacagtgggtttattaatataagaaaaaaggaagtgatggagctttagattttcttttaatattgctattccacctttgaatgggttgagcaagaatagcaatcatgttttaaccaatgtttatcttatgaatagtatttttgtcattttctgaggggtgtgtgtcaaaagctgccacttttatttccctagggataattgctgcttgttcttcaatttagaatatctggggtagtaattgatctggagaagcacttcttaaagtgcaatgctaattgcaggaaagagaaaaatgggttctgtggtcacacaggtttgggaaatgctgccttaaataaaattaaatagtgctttttttcttttgtcacaggattgataataatatgctctgtaaatctccaaaaggaaggttataatatacagcatttcccattgtcatctgatcattgaattttaaatttaattaaacacttttttggtttggtatgttctttgacatttaaatgtgttctctcagtttaaattttgggagacttaaccctcaaaatgtttgtgagatataaataatcctcttcttatgcatgtagagaggtgtatacaggcataacttggagatattgcaggttcagttctagaccaccacaataaagtgaatatcacaataaaatgagtcacacaaatgttttggtttcccagtgcatataaaagttatgttggtgggaggagccaagatggccaaataggaacagctcctgtctacagctcccagcgtgagcgacgcagaagacgggtgatttctgcatttccatctgaggtaccgggttcatctcacttgggagtgccagacagtgggcgcaggtcagtgggtgcgcgcaccgtgcgtgagccgaagcagggcgaggcattgcctcacttgggaagcgcaaggggtcagggagttccctttccaagtcaaataaaggggtgacagacgcacttggaaaatcaggtcactcccacccgaatactgcccttttccgactggcttaaaaaatggcgcaccacgagattatatcccgcacctggcttggagggtcctacgcccatggagtctcactgattgctagcacagcagtctgagatcaaactgcaaggcggcagcgaggctgggggaggggcgcccaccattgcccaggcttgcttaggtaaacaaagcagccgggaagctccaactgggtggagcccaccacagctcaaggaggcctgcctgcctctgtaggctccacctctgggggcagggcacagacaaacaaaaagacagcagtaacctctgcagacttaaatgtccctgtctgacagctttgaagagagcagtggttctcccagcacgcagctggagatctgagaacgggcagactgcctcctcaagtgggtccctgacccctgacccccgagcagcctaactgggaggcaccccccagcaggggcacactgacacctcacacggcagggtactccaacagacctgcagctgagggtcctctctgttagaaggaaaactaacaaatggaaaggacatccacaccaaaaacccatctgtacatcaccatcatcaaagaccaaaagtagataaaaccacaaagatgggaaaaaaacagagcagaaaaactggaaactctaaaaagcagagtgcctctcctcctccaaaggaatgcagttcctcaccagcaacagaacaaagctggatggagaatgactttgacgagctgagagaagcaggcttcagacgatcaaattactctgagctacgggaggacattcaaaccaaaggcaaaaaagttgaaaactttgaaaaaaatttagaagaatgtataactagaataaccaatacagagaagtgcttaaaggagctgatggagctgaaaaccaaggctcgagaactacgtgaagaatgcagaagcctcaggagccgatgtgatcaactggaagaaagggtatcagcaatggaagatgaaatgaatgaaatgaagcaagaagggaaggtt

SEQ ID NO: 4683 - DNA, 4376 bp, Homo sapiens
tgaccttctctcctccctgtgtctttttttttcctttagagatgggggtcttgctctgtcactccagctggagcacagtggtgcaatcggagctcactgactgcggcctgcaactcctgggctcaagtgattctgccgcctcagcctctcaacgtgctgcgattagagagtctgtagaagaggcgacaccagggcttccaaatgaacaaccgaaaggaagatatggaaatcacgtcccactaccggcacctgctgcgggagctcaacgagcagaggcagcacggcgtcctgtgcgacgtctgcgtggtcgtggagggcaaggtcttcaaggcgcacaagaacgtcctgctgggcagcagccgctacttcaagacgctctactgccaggtgcagaagacgtcggagcaggccacggtcacgcacctggacatcgtcacggcccagggcttcaaggccatcatcgacttcatgtactcagcgcacctggcgctcaccagcaggaacgtcatcgaggtgatgtcagccgccagcttcctgcagatgacggacatcgtgcaagcctgccacgacttcatcaaggcggcgctggacatcagcatcaagtcggacgcctcagatgagcttgcggagttcgagatcggcgcctcgtccagcagcagcacggaagctctcatctcggccgtgatggctgggaggagcatctccccgtggctggcacggcgaacgagtcctgccgattcttccggagactcggccatcgccagctgtcacgacggagggagcagctacgggaaagaggatcaggagcccaaggccgatggccctgatgatgtttcttcacagcctctatggcctggagacgtgggctacgggcctctgcgcatcaaggaagagcaggtttcaccgtctcagtacggagggagcgagctgccttctgccaaggacggtgcagtacagaactctttctcagagcagagtgctggtgatgcctggcagcccacgggccgaaggaagaatcggaaaaacaaagagaccgtccggcacatcacacagcaggtggaagatgacagccgggccagctccccggtgccgtccttcctgccgacgtcggggtggccgttcagcagccgagactcaaatgcggacctgtccgtcaccgaagccagcagctccgacagccgaggagagagggccgagctctatgcacaggtggaggagggtctcctgggaggagaagccagctatctgggccctcccctcaccccagagaaggacgacgccctgcatcaggccaccgcggtggccaacctgcgcgcggcgctcatgagtaagaacagcctgctgtcgctgaaggccgacgtgctgggggatgacggctccctgctgttcgagtacctgcccagaggggcccactcgctgtccctgaatgagttcacggtgatcaggaagaagttcaagtgtccgtactgcagcttctcggccatgcaccagtgcatcctcaagcgacacatgcgctcgcacacgggagagcggccctacccctgcgagatctgcgggaagaagttcacgcggcgcgagcacatgaagcgccacacgctggtccacagcaaggacaagaagtatgtgtgcaaggtgtgcagccgcgtcttcatgtccgccgccagcgtgggcatcaggcatggctccaggcgccacggtgtgtgcaccgactgtgctggccgcggcatggccgggcccctggaccatggcggcggaggcggcgagggctctccagaggcgctgttcccaggcgacgggccctatctggaggaccctgaggacccacgaggggaggcggaggagctgggcgaggacgacgagggcctggcccctgaggatgcgctgttggcggacgacaaggatgaggaagactcgccgcggccgcgcagccccccaggaggccctgacaaggacttcgcctggctctcctaggcccgcccgccggcagggtcggtggctgcctcgctccgtccacccgtgtgtgtgtccggtgggtctccactgcggggccagggccacgctcacccctctcgcggcccctcctctgcttccccctgaacccaccccccacggaaaccagccctgcgggctaagcaggtgcgaccccagcaagaggggtgctctgggaccagacatgaagtgagttgggggagggcacagggtgggtttgagtgaagggagagcacggtcctaagtccccagcaggtggtgcgggtgtgtgagtggcccctgtgatggccagcctggcttggacacgtgatgggcctgtggccgggtccagtgggcactgggcggggtggtgtgttcggcccagaggcccctggcctgagcaggtgcagagttttacagacacccggtcagcccggctggagcccgccctcccctcccctagcagccaggtcactgcctgtggctgcagccgtggcccgtggtgcagccgtggcccatggcagcctgtagaatccaggtgcacagagagccctgccaccgtcttacctctgggctttggtgcttaacacacaacacagctgcagaccctgctggaggccgagggctccaggtgctatcttaggtggacacagccctgggggctccttccaggaggggaccctcagccctgtgccccccaccacttcaggccacaccaggttccctctgcaagggcctcggctcagtcgtgtgcacttcctcggagagccttgggctgccacgtccaccccgggctctgcccgtcctgttctgcccatggcccagcccggccgctcctgctgacccctcctggacgggttggagctgggctcctgcctttgctgctaacactggaggcggtgttcctaactgcagtgtgctgcttacacctccccgcgtgggtaaccaaatttttaagtagtcagagacatatcgaggtagttacataaaattattttgtttggcattatttttctcactcgaagaaactatatagggttgtttttcctttagcttgtgctcaagtcctcttgctgtgttttcagaagcactcacatgttctttcttttcctgagtgaaaagcaaaggtcccacggtgtgtgctgtggtgcaccgcctggctttgggggtcccggaggcaggctgcctagactcacagcctcgggaccgttgccacggcctgtcttctcgttcaggcctgcctctgacagcactcaccatgaggacattccatccttcaccccctcctctggcacaggccaccactgcggtgctgtgccttcagatgggaggtgggcgcggtggccgcctccttccctccaggacctgcccgtgtgaagaccccccggagtgctgagcttcagggctgcgtggaaagagtttttactctctttttctagcctgtataccaggcttttccccacattgtcaggtagagcaccagcttccctgaccgctgctgctcggggagggctggggctggccgggggtcctgtggaggagtacatggaggactccaggtacagcgcaggagtcacggcttttgttttttgacattggcccccggttctaccaatgacagggtgccctggctggagctgtcatcacacacacccctcagctcggaggctgtgggctcctcaaagctggagaaagaggccaagatttttctgcacacggagtgtggggataggagccgggccaagcgctggcccctcagcggtgagccctgcccactcttaccgagcaaggtgggtggctctggcacgagtcccccagggggagagcatggctaccagggagctgcagcggagccctccagccctcaccccaggccagccccaccccggcctctttgagaattctcagaactttgtacctttcccctgatttttaaaccctttttctaaacagactgactttcttacaaaatgcatttggaaaccagacctttgctacccaccaatgtctctgggttttgtaccagtccctgctctcaggccaccctgcccaggacccaggcccgcctccccctccacactcaggatgtcctgctccatctggccggctcactccgtgtggcctgcctttgctgaccgttttggggttccccgccggagctacaggggcattttcttccctaaaaccaacagtgtcccactgacctccccaagtgtttgctgcgtggcagatttcctgttcttgttcgcagtttgccgactgaagagtgtgggatttccgaggcccaggtgagcacgtccatctcaggaggcgtggagggaaaagacatgtcatgaagggttttttttatgtgactgatttttttttaaatcgatgttcaaactaataaatatttttttatgaagagg

SEQ ID NO: 4684 - protein, 492 aa, Homo sapiens
MPSFLVPSLVSSPVLLKLLFSPGPKTIWSLWQQPMLFQEATAFENMTKDWNYLEGSQKDCYRDTMLDSYENTVPQGSFLQLSMMPQRAGNDPPGVSNASEMEMEISNMREKFLMSVTKLVESKSYNSKVFSKEKYFQTIKEVKEAKEKGKKSSRDYRRAAKYDVISVQGTEKLIEATHGERDRIRYYVHKEELFDILHDTHLSIGHGGRTRMLKELQGKYGNVTKEVIVLYLTLCKQCHQKNPVPKRGLAPKPMTFKDIDSTCQVEILDMQSSADGEFKFILYYQDHSTKFIILRPLRTKQAHEVVSVLLDIFTILGTPSVLDSDSGVEFTNQVVHELNELWPDLKIVSGKYHPGQSQGSLEGASRDVKNMISTWMQSNHSCHWAKGLRFMQMVRNQAFDVSLQQSPFEAMFGYKAKFGLYSSNLPRETVATLQTEEELEIAEEQLENSLWIRQEERAEIGADRSDMDDDMDPTPEASEPSTSQGTSGLLCW

SEQ ID NO: 4685 - protein, 287 aa, Homo sapiens
MDRPDEGPPAKTRRLSSSESPQRDPPPPPPPPPLLRLPLPPPQQRPRLQEETEAAQVLADMRGVGLGPALPPPPPYVILEEGGIRAYFTLGAECPGWDSTIESGYGEAPPPTESLEALPTPEASGGSLEIDFQVVQSSSFGGEGALETCSAVGWAPQRLVDPKSKEEAIIIVEDEDEDERESMRSSRRRRRRRRRKQRKVKRESRERNAERMESILQALEDIQLDLEAVNIKAGKAFLRLKRKFIQMRRPFLERRDLIIQHIPGFWVKALHSSVPQPPQNFNFDQPT

SEQ ID NO: 4686 - protein, 196 aa, Homo sapiens [sequence omitted]

SEQ ID NO: 4687 - protein, 295 aa, Homo sapiens [sequence omitted]

SEQ ID NO: 4688 - protein, 594 aa, Homo sapiens [sequence omitted]

SEQ ID NO: 4689 - protein, 120 aa, Homo sapiens
MFLAPLLHSLVLPGLFLAPPLHSAVLPGMFLAPPLHSPVLPGMFLAPPLHSPVLISHFSKVGFRGRRDERKDTASHGGYGSHLVMGLSGCDKYTKPHFFSWGAFGELLWRPSHRMLEDGF

SEQ ID NO: 4690 - protein, 461 aa, Homo sapiens
MEREGIWHSTLGETWEPNNWLEGQQDSHLSQVGVTHKETFTEMRVCGGNEFERCSSQDSILDTQQSIPMVKRPHNCNSHGEDATQNSELIKTQRMFVGKKIYECNQCSKTFSQSSSLLKHQRIHTGEKPYKCNVCGKHFIERSSLTVHQRIHTGEKPYKCNECGKAFSQSMNLTVHQRTHTGEKPYQCKECGKAFHKNSSLIQHERIHTGEKPYKCNECGKAFTQSMNLTVHQRTHTGEKPYECNECGKAFSQSMHLIVHQRSHTGEKPYECSQCGKAFSKSSTLTLHQRNHTGEKPYKCNKCGKSFSQSTYLIEHQRLHSGVKPFECNECGKAFSKNSSLTQHRRIHTGEKPYECMVCGKHFTGRSSLTVHQVIHTGEKPYECNECGKAFSQSAYLIEHQRIHTGEKPYECDQCGKAFIKNSSLTVHQRTHTGEKPYQCNECGKAFSRSTNLTRHQRTHT

SEQ ID NO: 4691 - protein, 122 aa, Homo sapiens
MTIATPFVCLIFAHSQVFTDFIPYSRHLQMPTSYPCSKTHFKCPLLWEMPVVPLDTNHLSSLEPITHAPTPISNAYSSRKCPSTHGQKSSLLLTANTAAHQAWALSHVLSITLTDLWPIYPH

SEQ ID NO: 4692 - protein, 123 aa, Homo sapiens [sequence omitted]

SEQ ID NO: 4693 - protein, 127 aa, Homo sapiens
MDLHHSVQPESLLLSTASFSFSLIIPFNSNKMTWPAHENTEMRPHLVISGVLRGTLVVVLGAAVLSVKNFQEFLISCFHQDSHNLLLLPLSSGFVPEHIIRKAAIITAYLPPAPLHKHPPSPHCAKQ

SEQ ID NO: 4694 - protein, 194 aa, Homo sapiens
MDRPSLVRSRKQSPRLSASSGNFIPPYHPSSLGKVERTNGLLKTHLTKLSLQLKKDWTALLPFALLRIRAYPQEATGYSPFELSYGCTFLLGPNLLTDNTYADMQQKKQLVFPHLSLTASFLPSHLSLPPILPLKLLPINPFLLMKLLPINPFLLKANGSWIKENSSFLPHRLILSYHPFRTSFMWVTSQWPIS

SEQ ID NO: 4695 - protein, 237 aa, Homo sapiens
MSCRHSFPLLLPCSLHSHAFLSSCHGDLCPLTSHTACFLACVPPQAGGHFQSSFTPCVRVINQIWAPVLHPLCHNSPCPPNLPGTRFGAMLDMLTDRCSTMCLLVNLALLYPGATLFFQISMSLDVASHWLHLHSSVVRGSESHKMIDLSGNPVLRIYYTSRPALFTLCAGNELFYCLLYLFHFSEGPLVGSVGLFRMGLWVTAPIALLKSLISVIHLITAARNMAALDAADRAKKK

SEQ ID NO: 4696 - protein, 111 aa, Homo sapiens [sequence omitted]

SEQ ID NO: 4697 - protein, 132 aa, Homo sapiens
MNEKKKMLKVAREKGQVTYKGKPIRLMVGLLADTLQAIRDLGPMFNISFLFFSFLFFFLDRVSLCHQAGVQWHDLGSLQPPPPRFKQFSCLSLPSSWDYRRAPSHLANFCIFSRDGVSPCWPGWSRSPDFMI

SEQ ID NO: 4698 - protein, 665 aa, Homo sapiens
MMKTFFSTGQGDTEAFHTGTLQRQASHHIGDFCFQKIEKDIHGFQFQWKEDETNDHAAPMTEIKELTGSTGQHDQRHAGNKHIKDQLGLSFHSHLPELHIFQPEGKIGNQVEKSINNASSVSTSQRICCRPKTHISNKYGNNSLHSSLLTQKRNVHMREKSFQCIESGKSFNCSSLLKKHQITHLEEKQCKCDVYGKVFNQKRYLACHRRSHIDEKPYKCNECGKIFGHNTSLFLHKALHTADKPYECEECDKVFSRKSHLETHKIIYTGGKPYKCKVCDKAFTCNSYLAKHTIIHTGEKPYKCNECGKVFNRLSTLARHRRLHTGEKPYECEECEKVFSRKSHLERHKRIHTGEKPYKCKVCDKAFAYNSYLAKHSIIHTGEKPYKCNECGKVFNQQSTLARHHRLHTAEQPYKCEECDKVFRCKSHLERHRRIHTGEKPYKCKVCDKAFRSDSCLTEHQRVHTGEKPYTCNECGKVFSTKANLACHHKLHTAEKPYKCEECEKVFSRKSHMERHRRIHTGEKPYKCKVCDKAFRRDSHLAQHQRVHTGEKPYKCNECGKTFRQTSSLIIHRRLHTGEKPYKCNECGKTFSQMSSLVYHHRLHSGEKPYKCNECGKVFNQQAHLAQHQRVHTGEKPYKCNECGKTFSQMSNLVYHHRLHSGEKP

SEQ ID NO: 4699 - protein, 986 aa, Homo sapiens
MPRATWANSKERSWAESERGPRDTGNGGSKAERHIQEIETGRGGDRAKAHRRQRMRLRGTERASLGPGRRLGDSRGTDMPGARAQGLAAAMTEESEETVLYIEHRYVCSECNQLYGSLEEVLMHQNSHVPQQHFELVGVADPGVTVATDTASGTGLYQTLVQESQYQCLECGQLLMSPSQLLEHQELHLKMMAPQEAVPAEPSPKAPPLSSSTIHYECVDCKALFASQELWLNHRQTHLRATPTKAPAPVVLGSPVVLGPPVGQARVAVEHSYRKAEEGGEGATVPSAAATTTEVVTEVELLLYKCSECSQLFQLPADFLEHQATHFPAPVPESQEPALQQEVQASSPAEVPVSQPDPLPASDHSYELRNGEAIGRDRRGRRARRNNSGEAGGAATQELFCSACDQLFLSPHQLQQHLRSHREGVFKCPLCSRVFPSPSSLDQHLGDHSSESHFLCVDCGLAFGTEALLLAHRRAHTPNPLHSCPCGKTFVNLTKFLYHRRTHGVGGVPLPTTPVPPEEPVIGFPEPAPAETGEPEAPEPPVSEETSAGPAAPGTYRCLLCSREFGKALQLTRHQRFVHRLERRHKCSICGKMFKKKSHVRNHLRTHTGERPFPCPDCSKPFNSPANLARHRLTHTGERPYRCGDCGKAFTQSSTLRQHRLVHAQHFPYRCQECGVRFHRPYRLLMHRYHHTGEYPYKCRECPRSFLLRRLLEVHQLVVHAGRQPHRCPSCGAAFPSSLRLREHRCAAAAAQAPRRFECGTCGKKVGSAARLQAHEAAHAAAGPGEVLAKEPPAPRAPRATRAPVASPAALGSTATASPAAPARRRGLECSECKKLFSTETSLQVHRRIHTGERPYPCPDCGKAFRQSTHLKDHRRLHTGERPFACEVCGKAFAISMRLAEHRRIHTGERPYSCPDCGKSYRSFSNLWKHRKTHQQQHQAAVRQQLAEAEAAVGLAVMETAVEALPLVEAIEIYPLAEAEGVQISG

SEQ ID NO: 4700 - protein, 441 aa, Homo sapiens [sequence omitted]

SEQ ID NO: 4701 - protein, 1389 aa, Homo sapiens
MKQLQPQPPPKMGDFYDPEHPTPEEEENEAKIENVQKTGFIKGPMFKGVASSRFLPKGTKTKVNLEEQGRQKVSFSFSLTKKTLQNRFLTALGNEKQSDTPNPPAVPLQVDSTPKMKMEIGDTLSTAEESSPPKSRVELGKIHFKKHLLHVTSRPLLATTTAVASPPTHAAPLPAVIAESTTVDSPPSSPPPPPPPAQATTLSSPAPVTEPVALPHTPITVLMAAPVPLPVDVAVRSLKEPPIIIVPESLEADTKQDTISNSLEEHVTQILNEQADISSKKEDSHIGKDEEIPDSSKISLSCKKTGSKKKSSQSEGIFLGSESDEDSVRTSSSQRSHDLKFSASIEKERDFKKSSAPLKSEDLGKPSRSKTDRDDKYFSYSKLERDTRYVSSRCRSERERRRSRSHSRSERGSRTNLSYSRSERSHYYDSDRRYHRSSPYRERTRYSQPYTDNRARESSDSEEEYKKTYSRRTSSHSSSYRDLRTSSYSKSDRDCKTETSYLEMERRGKYSSKLERESKRTSENEAIKRCCSPPNELGFRRGSSYSKHDSSASRYKSTLSKPIPKSDKFKNSFCCTELNEEIKQSHSFSLQTPCSKGSELRMINKNPEREKAGSPAPSNRLNDSPTLKKLDELPIFKSEFITHDSHDSIKELDSLSKVKNDQLRSFCPIELNINGSPGAESDLATFCTSKTDAVLMTSDDSVTGSELSPLVKACMLSSNGFQNISRCKEKDLDDTCMLHKKSESPFRETEPLVSPHQDKLMSMPVMTVDYSKTVVKEPVDTRVSCCKTKDSDIYCTLNDSNPSLCNSEAENIEPSVMKISSNSFMNVHLESKPVICDSRNLTDHSKFACEEYKQSIGSTSSASVNHFDDLYQPIGSSGIASSLQSLPPGIKVDSLTLLKCGENTSPVLDAVLKSKKSSEFLKHAGKETIVEVGSDLPDSGKGFASRENRRNNGLSGKCLQEAQEEGNSILPERRGRPEISLDERGEGGHVHTSDDSEVVFSSCDLNLTMEDSDGVTYALKCDSSGHAPEIVSTVHEDYSGSSESSNDESDSEDTDSDDSSIPRNRLQSVVVVPKNSTLPMEETSPCSSRSSQSYRHYSDHWEDERLESRRHLYEEKFESIASKACPQTDKFFLHKGTEKNPEISFTQSSRKQIDNRLPELSHPQSDGVDSTSHTDVKSDPLGHPNSEETVKAKIPSRQQEELPIYSSDFEDFPNKSWQQTTFQNRPDSRLGKTELSFSSSCEIPHVDGLHSSEELRNLGWDFSQEKPSTTYQQPDSSYGACGGHKYQQNAEQYGGTRDYWQGNGYWDPRSGRPPGTGVVYDRTQGQVPDSLTDDREEEENWDQQDGSHFSDQSDKFLLSLQKDKGSVQAPEISSNSIKDTLAVNEKKDF

SEQ ID NO: 4702 - protein, 134 aa, Homo sapiens
MVGLLFHAPKAPEMAPLRCCIMNKIIMVRRPKQSTADYGMRTSGPVESGLSADSLQLLCSYAAIKNSAELLMVGPQGMRPATGQDLLCRPCLSHDPPGPLHPPRGLSGSSSLLISPRLQDVSLQLVHPTPEESF

SEQ ID NO: 4703 - protein, 743 aa, Homo sapiens
MSSLAAKRLGMNRRPAGSGGGGGEAATWGHRFWRPQERPTDRNQGEMAHTCRGTINLSTAHIDTEDSCGILLTSGARSYHLKASSEVDRQQWITALELAKAKAVRVMNTHSDDSGDDDEATTPADKSELHHTLKNLSLKLDDLSTCNDLIAKHGAALQRSLTELDGLKIPSESGEKLKVVNERATLFRITSNAMINACRDFLELAEIHSRKWQRALQYEQEQRVHLEETIEQLAKQHNSLERAFHSAPGRPANPSKSFIEGSLLTPKGEDSEEDEDTEYFDAMEDSTSFITVITEAKEDSRKAEGSTGTSSVDWSSADNVLDGASLVPKGSSKVKRRVRIPNKPNYSLNLWSIMKNCIGRELSRIPMPVNFNEPLSMLQRLTEDLEYHHLLDKAVHCTSSVEQMCLVAAFSVSSYSTTVHRIAKPFNPMLGETFELDRLDDMGLRSLCEQVSHHPPSAAHYVFSKHGWSLWQEITISSKFRGKYISIMPLGAIHLEFQASGNHYVWRKSTSTVHNIIVGKLWIDQSGDIEIVNHKTNDRCQLKFLPYSYFSKEAARKVTGVVSDSQGKAHYVLSGSWDEQMECSKVMHSSPSSPSSDGKQKTVYQTLSAKLLWKKYPLPENAENMYYFSELALTLNEHEEGVAPTDSRLRPDQRLMEKGRWDEANTEKQRLEEKQRLSRRRRLEACGPGSSCSSEEEKEADAYTPLWFEKRLDPLTGEMACVYKGGYWEAKEKQDWHMCPNIF

SEQ ID NO: 4704 - protein, 577 aa, Homo sapiens [sequence omitted]

SEQ ID NO: 4705 - protein, 121 aa, Homo sapiens [sequence omitted]

SEQ ID NO: 4706 - protein, 202 aa, Homo sapiens [sequence omitted]

SEQ ID NO: 4707 - protein, 339 aa, Homo sapiens
MLPSAVAAHAGAYWDVVASSALLNLPAAPGFGNLGKSFLIENLLRVGGAPTPRLQPPAPHDPATALATAGAQLRPLPASPVPLKLCPAAEQVSPAGAPYGTRWAFQVLSPSADSARLPGRAPGDRDCTFQPSAPAPSKPFLLSTPPFYSACCGGSCRRPASSTAFPREESVLPLLTQDSNSKARRGILRRAVFSEDQRKALEKMFQKQKYISKTDRKKLAINLGLKESQVKIWFQNRRMKWRNSKEKEVLSNRCIQEVGLQEDPLSRSALGFPSPCPSIWDVPQQHSSPRWRENSPEPSERLIQESSGAPPPEANSLQGALYLCSEEEAGSKGVLTGAV

SEQ ID NO: 4708 - protein, 259 aa, Homo sapiens [sequence omitted]

SEQ ID NO: 4709 - protein, 722 aa, Homo sapiens
MMKEVLSTGQGNTEVIHTGTLQRYQSYHIGDFCFQEIEKEIHDIEFQCQEDERNGHEAPMTKIKKLTGSTDQHDHRHAGNKPIKDQLGSSFYSHLPELHIIQIKGKIGNQFEKSTSDAPSVSTSQRISPRPQIHISNNYGNNSPNSSLLPQKQEVYMREKSFQCNESGKAFNCSSLLRKHQIPHLGDKQYKCDVCGKLFNHKQYLTCHRRCHTGEKPYKCNECGKSFSQVSSLTCHRRLHTAVKSHKCNECGKIFGQNSALVIHKAIHTGEKPYKCNECDKAFNQQSNLARHRRIHTGEKPYKCEECDKVFSRKSTLESHKRIHTGEKPYKCKVCDTAFTWNSQLARHKRIHTGEKTYKCNECGKTFSHKSSLVCHHRLHGGEKSYKCKVCDKAFAWNSHLVRHTRIHSGGKPYKCNECGKTFGQNSDLLIHKSIHTGEQPYKYEECEKVFSCGSTLETHKIIHTGEKPYKCKVCDKAFACHSYLAKHTRIHSGEKPYKCNECSKTFHLRSYLASHRRVHSGEKPYKCNECSKTFSQRSYLHCHRRLHSGEKPYKCNECGKTFSHKPSLVHHRRLHTGEKSYKCTVCDKAFVRNSYLARHTRIHTAEKPYKCNECGKAFNQQSQLSLHHRIHAGEKLYKCETCDKVFSRKSHLKRHRRIHPGKKPYKCKVCDKTFGSDSHLKQHTGLHTGEKPYKCNECGKAFSKQSTLIHHQAVHGVGKLD

SEQ ID NO: 4710 - protein, 422 aa, Homo sapiens
MFQTAWRQEPVTFEDVAVYFTQNEWASLDSVQRALYREVMLENYANVASLAFPFTTPVLVSQLEQGELPWGLDPWEPMGREALRGICPGDEARTEKEGLTPKDHVSKETESFRLMVGGLPGNVSQHLDFGSSLEQPQGHWIIKTKSKRRHFTDTSARHHEAYEVKNGEKFEKLGKNISVSTQLTTNQTNPSGQISYECGQCGRYFIQMADFHRHEKCHTGEKSFECKECGKYFRYNSLLIRHQIIHTGKKPFKCKECGKGLSSDTALIQHQRIHTGEKPYECKECGKAFSSSSVFLQHQRFHTGEKLYECNECWKTFSCSSSFTVHQRMHTGEKPYECKECGKRLSSNTALTQHQRIHTGEKPFECKECGKAFNQKITLIQHQRVHTGEKPYECKVCGKTFSWCGRFILHQKLHTQKTPVQA

SEQ ID NO: 4711 - protein, 446 aa, Homo sapiens [sequence omitted]

SEQ ID NO: 4712 - protein, 488 aa, Homo sapiens [sequence omitted]

SEQ ID NO: 4713 - protein, 318 aa, Homo sapiens
MVLSSGPQWCGSQELWFGKTCEEKSRLGRWPGYLNGGRMESSTNDIIEVIVKDEMISVEESSGNTDVNNLLGIHHKILNEQIFYICEECGKCFDQNEDFDQHQKTHNGEKVYGCKECGKAFSFRSHCIAHQRIHSGVKPYECQECAKAFVWKSNLIRHQRIHTGEKPFECKECGKGFSQNTSLTQHQRIHTGEKPYTCKECGKSFTRNPALLRHQRMHTGEKPYECKDCGKGFMWNSDLSQHQRVHTGDKPHECTDCGKSFFCKAHLIRHQRIHTGERPYKCNDCGKAFSQNSVLIKHQRRHARDKPYNCQISHLLEH

SEQ ID NO: 4714 - protein, 743 aa, Homo sapiens
MISQFFILSSKGDPLIYKDFRGDSGGRDVAELFYRKLTGLPGDESPVVMDYGYVQTTSTEMLRNFIQTEAVVSKPFSLFDLSSVGLFGAETQQSKVAPSSAASRPVLSSRSDQSQKNEVFLDVVERLSVLIASNGSLLKVDVQGEIRLKSFLPSGSEMRIGLTEEFCVGKSELRGYGPGIRVDEVSFHSSVNLDEFESHRILRLQPPQGELTVMRYQLSDDLPSPLPFRLFPSVQWDRGSGRLQVYLKLRCDLLSKSQALNVRLHLPLPRGVVSLSQELSSPEQKAELAEGALRWDLPRVQGGSQLSGLFQSRKGADLDREKKAAECKVDSIGSGRAIPIKQGILLKRSGKSLNKEWKKKYVTLCDNGLLTYHPSLHDYMQNIHGKEIDLLRTTVKVPGKRLPRATPATAPGTSPRANGLSVERSNTQLGGGTEAEESFEFVVVSLTGQTWHFEASTAEERELWVQSVQAQILASLQGCRSAKDKTRLGNQNAALAVQAVRTVRGNSFCIDCDAPNPDWASLNLGALMCIECSGIHRHLGAHLSRVRSLDLDDWPPELLAVMTAMGNALANSVWEGALGGYSKPGPDACREEKERWIRAKYEQKLFLAPLPSSDVPLGQQLLRAVVEDDLRLLVMLLAHGSKEEVNETYGDGDGRTALHLSSAMANVVFTQLLIWYGVDVRSRDARGLTPLAYARRAGSQECADILIQHGCPGEGCGLAPTPNREPANGTNPSAELHRSPSLL

SEQ ID NO: 4715 - protein, 141 aa, Homo sapiens
MQIQEIQRTPLRYSKRRSTPRPLIIGFSKVELLRAAREKGQVTYKGKPIRPTADFSAEPLQARRDCGPISNILKGKNFQPRISYPAKLISFISEGEIKSFPDKQMLRDFVTTRPALQELLKEALNMERKNQYQPLQKHTKI

SEQ ID NO: 4716 - protein, 715 aa, Homo sapiens
MATFMDPGVFPRADEDEDKEDDFRAPLYKNVDVRGIQVRMKWCATCHFYRPPRCSHCSVCDNCVEDFDHHCPWVNNCIGRRNYRYFFLFLLSLSAHMVGVVAFGLVYVLNHAEGLGAAHTTITMAVMCVAGLFFIPVIGLTGFHVVLVTRGRTTNEQVTGKFRGGVNPFTRGCCGNVEHVLCSPLAPRYVVEPPRLPLAVSLKPPFLRPELLDRAAPLKVKLSDNGLKAGLGRSKSKGSLDRLDEKPLDLGPPLPPKIEAGTFSSDLQTPRPGSAESALSVQRTSPPTPAMYKFRPAFPTGPKVPFCGPGEQVPGPDSLTLGDDSIRSLDFVSEPSLDLPDYGPGGLHAAYPPSPPLSASDAFSGALRSLSLKASSRRGGDHVALQPLRSEGGPPTPHRSIFAPHALPNRNGSLSYDSLLNPGSPGGHACPAHPAVGVAGYHSPYLHPGATGDPPRPLPRSFSPVLGPRPREPSPVRYDNLSRTIMASIQERKDREERERLLRSQADSLFGDSGVYDAPSSYSLQQASVLSEGPRGPALRYGSRDDLVAGPGFGGARNPALQTSLSSLSSSVSRAPRTSSSSLQADQASSNAPGPRPSSGSHRSPARQGLPSPPGTPHSPSYAGPKAVAFIHTDLPEPPPSLTVQRGRIGTCTRGWGRRGQPWVPPGLHLCHLGRPEDRPPLRAPWSQAAGAPPRGAMCRLHLAASSLFPSLSGP

SEQ ID NO: 4717 - protein, 851 aa, Homo sapiens [sequence omitted]

SEQ ID NO: 4718 - protein, 312 aa, Homo sapiens [sequence omitted]

SEQ ID NO: 4719 - protein, 123 aa, Homo sapiens
MPGPPGSLEMGPLTFRDVAIEFSLEEWQCLDTAQRNLYRKVMFENYRNLVFLGIAVSKPHLITCLEQGKEPWNRKRQEMVAKPPESYCVAQADLELLVSSYLTALASLKMWDYRNNPLCQATM

SEQ ID NO: 4720 - protein, 301 aa, Homo sapiens
MAVRPGLWPALLGIVLAAWLRGSGAQQSATVANPVPGANPDLLPHFLVEPEDVYIVKNKPVLLVCKAVPATQIFFKCNGEWVRQVDHVIERSTDGSNGLPTMEVRINVSRQQVEKVFGLEEYWCQCVAWSSSGTTKSQKAYIRIAYLRKNFEQEPLAKEVSLEQGIVLPCRPPEGIPPAEVEWLRNEDLVDPSLDPNVYITREHSLVVRQARLADTANYTCVAKNIVARRRSASAAVIVYVDGSWSPWSKWSACGLDCTHWRSRECSDPAPRNGGEECQGTDLDTRNCTSDLCVHSESSLP

SEQ ID NO: 4721 - protein, 101 aa, Homo sapiens
MLREVCVCVCVCVCVCPLCTEAAVRDVTNLNLPESWRFTFCKGRGHSWTVTIPILVRVAGTEQSHQHAKVHLQSSMHAPRKPPVGYASCTFPFSLTSVSCL

SEQ ID NO: 4722 - protein, 116 aa, Homo sapiens
MTFRSGGGDALGKAACLVPAASRPQSPILQMTSREVTPQVGNRAGFGIRVCLFPPRDPESWQPVSKLLYVHHTSGFRFIGVFLKLRLVSVQLLLVRHLSYTRHCPWCWRHSNEEDR

SEQ ID NO: 4723 - protein, 166 aa, Homo sapiens
MRHTSKRKPQYYEAEMVLKYYKHLEEGSVSLCCPGWSAVAQSRLTAASTFGAQVILLFQLSEQLRLQELKLPTFRAHSPLLKSRRFFVDILTLLSSHCQLCPAARHLAVYLLDHFMDRYNVTTSKQLYTVAVSCLLLASRNKGSGSPVPTRSAQQCRQTWARGSPW

SEQ ID NO: 4724 - protein, 165 aa, Homo sapiens
MLFFNKKNFFNHGLSGFSCPLDTFLCLSLSLFPALHRGPPGSRGPLIPPLLSLPPPPWGRGPIRRGLGPRSSPYGRGWWGVNAEPPFPGPGHGGPTRGSFHKEQRNPRRLKSWSLIKNTCPPKDDPQVMEDKSDRPVCRHFAKKGHCRYEDLCAFYHPGVNGPPL

SEQ ID NO: 4725 - protein, 141 aa, Homo sapiens
MRDNIIISGSTDRTLKVWNAETGECIHTLYGHTSTVRCMHLHEKRVVSGSRDATLRVWDIETGQCLHVLMGHVAAVRCVQYDGRRVVSGAYDFMVKAWDPETETCLHTLQGHTNRVYSLQVRSLISPLNALLMNHKVVLLR

SEQ ID NO: 4726 - protein, 326 aa, Homo sapiens
MDAIKKKMQMLKLDKENALDRAEQAEADKKAAEDRSKQLEEDIAAKEKLLRVSEDERDRVLEELHKAEDSLLAAEEAAAKLEDELVSLQKKLKGTEDELDKYSEALKDAQEKLELAEKKATDAEADVASLNRRIQLVEEELDRAQERLATALQKLEEAEKAADESERGMKVIESRAQKDEEKMEIQEIQLKEAKHIAEDADRKYEEVARKLVIIESDLERAEERAELSEGKCAELEEELKTVTNNLKSLEAQAEKYSQKEDRYEEEIKVLSDKLKEAETRAEFAERSVTKLEKSIDDLEEKVAHAKEENLSMHQMLDQTLLELNNM

SEQ ID NO: 4727 - protein, 268 aa, Homo sapiens
MAAATGAVAASAASGQAEGKKITDLRVIDLKSELKRRNLDITGVKTVLISRLKQAIEEEGGDPDNIELTVSTGTPNKKPTKGKGKKHEADELSGDASVEDDAFIKDGEEEENEKGSLAEADHTAHEEMEAHTTVKEAEDDNISVTIQAEDAITLDFDGDDLLETGKNVKITDSEASKPKDGQDAIAQSPEKESKDYEMNANHKDGKKEDCVKGDPVEKEARESSKKAESGDKEKDTLKKGPSSTGASGQAKRFVFLCQFFTILNSSIQ

SEQ ID NO: 4728 - protein, 105 aa, Homo sapiens [sequence omitted]

SEQ ID NO: 4729 - protein, 336 aa, Homo sapiens
MKERKRHLGDTKHFCPVVLKENFILQPGNTEEAAKYREKIYYFSSAEAKEKFLEHPEDYVAHEEPLKAPPLRICLVGPQGSGKTMCGRQLAEKLNIFHIQFEEVLQEKLLLKTEKKVGPEFEEDSENEQAAKQELEELAIQANVKVEEENTKKQLPEVQLTEEEEVIKSSLMENEPLPPEILEVILSEWWLKEPIRSTGFILDGFPRYPEEAQFLGDRGFFPDAAVFIQVDDQDIFDRLLPAQIEKWKLKQKKKLERKKLIKDMKAKIRVDTIAKRRAELILERDKKRREVSSFVFFFKTGSHSVAQGRVQWHNHSSLQPRTPGLKGSSHLSLSKC

SEQ ID NO: 4730 - protein, 438 aa, Homo sapiens
MHPLPGYWSCYCLLLLFSLGVQGSLGAPSAAPEQVHLSYPGEPGSMTVTWTTWVPTRSEVQFGLQPSGPLPLRAQGTFVPFVDGGILRRKLYIHRVTLRKLLPGVQYVYRCGSAQGWSRRFRFRALKNGAHWSPRLAVFGDLGADNPKAVPRLRRDTQQGMYDAVLHVGDFAYNLDQDNARVGDRFMRLIEPVAASLPYMTCPGNHEERYNFSNYKARFSMPGDNEGLWYSWDLGPAHIISFSTEVYFFLHYGRHLVQRQFRWLESDLQKANKNRAARPWIITMGHRPMYCSNADLDDCTRHESKVRKGLQGKLYGLEDLFYKYGVDLQLWAHEHSYERLWPIYNYQVFNGSREMPYTNPRGPVHIITGSAGCEERLTPFAVFPRPWSAVRVKEYGYTRLHILNGTHTHIQQVSDDQDGKIVDDVWVVRPLFGRRMYL

SEQ ID NO: 4731 - protein, 607 aa, Homo sapiens
MAEEGAILKVTKDLRAAVSAILQGYGDGQGPVTDTSAELHRLCGCLELLLQFDQKEQKSFLGPRKDYWDFLCTALRRQRGNMEPIHFVRSQDKLKTPLGKGRAFIRFCLARGQLAEALQLCLLNSELTREWYGPRSPLLCPERQEDILDSLYALNGVAFELDLQQPDLDGAWPMFSESRCSSSTQTQGRRPRKNKDAPKKVPLPCLHSELPLPHLLGILKIPAAYGGPENVQIEDSHTSQAICLQDAPSGQQLAGLPRSQQQRHLPFFLEKKGESSRKHRYPQSMWEPEGKELQLDQEERAPWIEIFLGNSTPSTQGQGKGAMGTQKEVIGMEAEVTGVLLVAEGQRTTEGTHKKEAEWSHVQRLLMPSPRGAVEGAVSGSRQGSGGSSILGEPWVLQGHATKEDSTVENPQVQTEVTLVARREEQAEVSLQDEIKSLRLGLRKAEEQAQRQEQLLREQEGELQALREQLSRCQEERAELQAQLEQKQQEAERRDAMYQEELGGQRDLVQAMKRRVLELIQEKDRLWQRLQHLSSMAPECCVACSKIFGRFSRRYPCSARTSLGREESEPPGEAAMWRWRLWRGRASGHPSGEGRPPETNQGHSTGR

SEQ ID NO: 4732 - protein, 148 aa, Homo sapiens
MSCNLASLCSKVLEQGAYHPILIPSPLSPPWTHCAQHLRPCTCKGSSHYGDQQPRSQVLNSKMLLSASVLDLSSVDSDAFEILLSLASIAIRTPRVCHPLLPLHFILLHKGQPSHVEVLWDAAWLFFIVDLMFSSILLCTFLRLQYFV

SEQ ID NO: 4733 - protein, 392 aa, Homo sapiens
MQPLTKDAGMSLSSVTLASALQVRGEALSEEEIWSLLFLAAEQLLEDLRNDSSDYVVCPWSALLSAAGSLSFQGRVSHIEAAPFKAPELLQGQSEDEQPDASQMHVYSLGMTLYWSAGFHVPPHQPLQLCEPLHSILLTMCEDQPHRRCTLQSVLEACRVHEKEVSVYPAPAGLHIRRLVGLVLGTISEVEKRVVEESSSVQQNRSYLLRKRLRGTSSESPAAQAPECLHPCRVSERSTETQSSPEPHWSTLTHSHCSLLVNRALPGADPQDQQAGRRLSSGSVHSAADSSWPTTPSQRGFLQRRSKFSRPEFILLAGEAPMTLHLPGSVVTKKGKSYLALRDLCVVLLNGQHLEVKCDVESTVGAVFNAVTSFANLEELTYFGLAYMKSGE

SEQ ID NO: 4734 - protein, 357 aa, Homo sapiens
MPECWDGEHDIETPYGLLHVVIRGSPKGNRPAILTYHDVGLNRKCSPASVSPPLPPISQSDKLCFNTFFNFEDMQEITKHFVVCHVDAPGQQVGASQFPQGYQFPSMEQLAAMLPSVVQHFGFKYVIGIGVGAGAYVLAKFALIFPDLVEGLVLVNIDPNGKGWIDWAATKLSGLTSTLPDTVLSHLFSQEELVNNTELVQSYRQQIGNVVNQANLQLFWNMYNSRRDLDINRPGTVPNAKTLRCPVMLVVGDNAPAEDGVVECNSKLDPTTTTFLKMADSGGLPQVTQPGKLTEAFKYFLQGMGYMPSASMTRLARSRTASLTSASSVDGSRPQACTHSESSEGLGQVNHTMEVSC

SEQ ID NO: 4735 - protein, 357 aa, Homo sapiens [sequence omitted]

SEQ ID NO: 4736 - protein, 217 aa, Homo sapiens
MLSLQDSVFFEISIKSLLKSWSSSSSAPVSKVNKYCASSNFHSTWGKKNIIMSNITIDPDVKPGEYVIKSLFAEFAVQAEKKIEVVMAEPLEKLLSRSLQRGEDLQFDQLISSMSSVAEHCLPSLLRTLFDWYRRQNGTEDESYEYRPRSSTKSKGDEQQRERDYLLERRDLAVDFIFCLVLVEVLKQVSSFISAKSVFLILCLLCLRVSVTLRCCV

SEQ ID NO: 4737 - protein, 908 aa, Homo sapiens
MGVNDLWQILEPVKQHIPLRNLGGKTIAVDLSLWVCEAQTVKKMMGSVMKPHLRNLFFRISYLTQMDVKLVFVMEGEPPKLKADVISKRNQTRYGSSGKSWSQKTGRSHFKSVLRECLHMLECLGIPWVQAAGEAEAMCAYLNAGGHVDGCLTNDGDTFLYGAQTVYRNFTMNTKDPHVDCYTMSSIKSKLGLDRDALVGLAILLGCDYLPKGVPGVGKEQALKLIQILKGQSLLQRFNRWNETSCNSSPQLLVTKKLAHCSVCSHPGSPKDHERNGCRLCKSDKYCEPHDYEYCCPCEWHRTEHDRQLNEVENNIKKKACCCEGFPFHEVIQEFLLNKDKLVKVIRYQRPDLLLFQRFTLEKMEWPNHYACEKLLVLLTHYDMIERKLGSRNSNQLQPIRIVKTRIRNGVHCFEIEWEKPEHYAMEDKQHGEFALLTIEEESLFEAAYPEIVAVYQKQKLEIKGKKQKRIKPKENNLPEPDEVMSFQSHMTLKPTCEIFHKQNSKLNSGISPDPTLPQESISASLNSLLLPKNTPCLNAQEQFMSSLRPLAIQQIKAVSKSLISESSQPNTSSHNISVIADLHLSTIDWEGTSFSNSPAIQRNTFSHDLKSEVESELSAIPDGFENIPEQLSCESERYTANIKKVLDEDSDGISPEEHLLSGITDLCLQDLPLKERIFIKLSYPQDNLQPDVNLKTLSILSVKESCIANSGSDCTSHLSKDLPGIPLQNESRDSKILKGDQLLQEDYKVNTSVPYSVSNTVVKTCNVRPPNTALDHSRKVDMQTTRKILMKKSVCLDRHSSDEQSAPVFGKAKYTTQRMKHSSQKHNSSHFKESGHNKLSSPKIHIKETEQCVRSYETAENEESCFPDSTKSSLSSLQCHKKENNSGTCLDSPLPLCQRLKLRFQST

SEQ ID NO: 4738 - protein, 637 aa, Homo sapiens
MLPNFKLYNFIEIFFKPLTPSKNRFHFVSYFENVNFMLCWLQENNFCLLLCFLSGLLSRHKTKKLSSEKDIHEISLSKESIIEKSKTLRLKGSIFRNEWQNKSEFEGQQGLKERSISQKKIVSKKMSTDRKRPSFTLNQRIHNSEKSCDSHLVQHGKIDSDVKHDCKECGSTFNNVYQLTLHQKIHTGEKSCKCEKCGKVFSHSYQLTLHQRFHTGEKPYECQECGKTFTLYPQLNRHQKIHTGKKPYMCKKCDKGFFSRLELTQHKRIHTGKKSYECKECGKVFQLIFYFKEHERIHTGKKPYECKECGKAFSVCGQLTRHQKIHTGVKPYECKECGKTFRLSFYLTEHRRTHAGKKPYECKECGKSFNVRGQLNRHKTIHTGIKPFACKVCEKAFSYSGDLRVHSRIHTGEKPYECKECGKAFMLRSVLTEHQRLHTGVKPYECKECGKTFRVRSQISLHKKIHTDVKPYKCVRCGKTFRFGFYLTEHQRIHTGEKPYKCKECGKAFIRRGNLKEHLKIHSGLKPYDCKECGKSFSRRGQFTEHQKIHTGVKPYKCKECGKAFSRSVDLRIHQRIHTGEKPYECKQCGKAFRLNSHLTEHQRIHTGEKPYECKVCRKAFRQYSHLYQHQKTHNVI

SEQ ID NO: 4739 - protein, 170 aa, Homo sapiens [sequence omitted]

SEQ ID NO: 4740 - protein, 492 aa, Homo sapiens
MASPSGKGARALEAPGCGPRPLARDLVDSVDDAEGLYVAVERCPLCNTTRRRLTCAKCVQSGDFVYFDGRDRERFIDKKERLSRLKSKQEEFQKEVLKAMEGKWITDQLRWKIMSCKMRIEQLKQTICKGNEEMEKNSEGLLKTKEKNQKLYSRAQRHQEKKEKIQRHNRKLGDLVEKKTIDLRSHYERLANLRRSHILELTSVIFPIEEVKTGVRDPADVSSESDSAMTSSTVSKLAEARRTTYLSGRWVCDDHNGDTSISITGPWISLPNNGDYSAYYSWVEEKKTTQGPDMEQSNPAYTISAALCYATQLVNILSHILDVNLPKKLCNSEFCGENLSKQKFTRAVKKLNANILYLCFSQHVNLDQLQPLHTLRNLMYLVSPSSEHLGRSGPFEVRADLEESMEFVDPGVAGESDESGDERVSDEETDLGTDWENLPSPRFCDIPSQSVEVSQSQSTQASPPIASSSAGGMISSAAASVTSWFKAYTGHR

SEQ ID NO: 4741 - protein, 415 aa, Homo sapiens
MLSMTYSESLRSVSSRCHSEWALHPVRQTDTLELQRLREVRAAAQARNMESFLRMHGLSLDGCTAQRTGMKYRNLGKSGLRVSCLGLGTWVTFGGQITDEMAEQLMTLAYDNGINLFDTAEVYAAGKAEVVLGNIIKKKGWRRSSLVITTKIFWGGKAETERGLSRKHIIEGLKASLERLQLEYVDVVFANRPDPNTPMEGDPFSSSKSRTFIIEETVRAMTHVINQGMAMYWGTSRWSSMEIMEAYSVARQFNLTPPICEQAEYHMFQREKVEVQLPELFHKIGVGAMTWSPLACGIVSGKYDSGIPPYSRASLKGYQWLKDKILSEEGRRQQAKLKELQAIAERLGCTLPQLAIAWCLRNEGVSSVLLGASNADQLMENIGAIQVLPKLSSSIIHEIDSILGNKPYSKKDYRS

SEQ ID NO: 4742 - protein, 127 aa, Homo sapiens
MRQWPVAVPCSRQQCCRSSLQPTICHYFMRLLKDKGLLLRCYTQNIDTLERIAGLEQEDLVEAHGTFYTSHCVSASCRHEYPLSWMKEKIFSEVTPKCEDCQSLVKPGEPLARDLPRWIWVGVPSSP

SEQ ID NO: 4743 - protein, 540 aa, Homo sapiens
MPNKNKKEKESPKAGKSGKSSKEGQDTVESEQISVRKNSLVAVPSTVSAKIKVPVSQPIVKKDKRQNSSRFSASNNRELQKLPSLKDVPPADQEKLFIQKLRQCCVLFDFVSDPLSDLKWKEVKRAALSEMVEYITHNRNVITEPIYPEVVHMFAVNMFRTLPPSSNPTGAEFDPEEDEPTLEAAWPHLQLVYEFFLRFLESPDFQPNIAKKYIDQKFVLQLLELFDSEDPRERDFLKTTLHRIYGKFLGLRAYIRKQINNIFYRFIYETEHHNGIAELLEILGSIINGFALPLKEEHKIFLLKVLLPLHKVKSLSVYHPQLAYCVVQFLEKDSTLTEPVVMALLKYWPKTHSPKEVMFLNELEEILDVIEPSEFVKIMEPLFRQLAKCVSSPHFQVAERALYYWNNEYIMSLISDNAAKILPIMFPSLYRNSKTHWNKTIHGLIYNALKLFMEMNQKLFDDCTQQFKAEKLKEKLKMKEREEAWVKIENLAKANPQAQKDPKKDRPLARRKSELPQDPHTKKALEAHCRADELASQDGR

SEQ ID NO: 4744 - protein, 361 aa, Homo sapiens
MHCSCLAEGIPANPGNWISGLAFPDWAYKAESSPGSRQIQLWHFILELLQKEEFRHVIAWQQGEYGEFVIKDPDEVARLWGRRKCKPQMNYDKLSRALRYYYNKRILHKTKGKRFTYKFNFSKLIVVNYPLWEVRAPPSPHLLLGAPALCRPALVPVGVQSELLHSMLFAHQAMVEQLTGQQTPRGPPETSGDKKGSSSSVYRLGSAPGPCRLGLCCHLGSVQGELPGVASFTPPLPPPLPSNWTCLSGPFLPPLPSEQQLPGAFKPDILLPGPRSLPGAWHFPGLPLLAGLGQGAGERLWLLSLRPEGLEVKPAPMMEAKGGLDPREVFCPETRRLKTGEESLTSPNLENLKAVWPLDPP

SEQ ID NO: 4745 - protein, 169 aa, Homo sapiens [sequence omitted]

SEQ ID NO: 4746 - protein, 182 aa, Homo sapiens
MWILRVLLGRHLPQWNASSEWCMAGPHGGSTQGLNTGKELARGVRTSGIWESAAWDHKESKSSATCWSLRPEGRPDFRDHPWMSLDWELYVDGSNFVNSQGERCVGYAVVTLDAVIEAKSLPQGTSAQKAELIALIRASELSEGKTVNIYTDSQYAFLTLQVHGALYKEKGLLNSGGKDVKY

SEQ ID NO: 4747 - protein, 957 aa, Homo sapiens [sequence omitted]

SEQ ID NO: 4748 - protein, 177 aa, Homo sapiens [sequence omitted]

SEQ ID NO: 4749 - protein, 113 aa, Homo sapiens
MYCLKQFLPLCVTCGLSIVPVVIALIYKCPLFLSCNIFLVTCVTPSVTVHLCSLYKHNSSSSLCPTPSLPFGFACNVFICVRQSPTVFLPCGSCFGSLQMSLPTIFLASSRDH

SEQ ID NO: 4750 - protein, 202 aa, Homo sapiens
MTGSNSHITILILNANGLNAPIKRHRLTNWIKSQDPSVCCIEETHLMCRDTHGLKIKGWRKICQANGKQKKEGVAILVSDKTGFKPTKIKRDKEGHYIMVKGSIQQEELTVLNICAPNIGAPRFIKQVLSDLQSDLDSHTIIMGDFNTPLSTLDRSTRQKVNKDIQELNTALHQADLIDIYRTLHPTSTEYTFFSAPHLFQN

SEQ ID NO: 4751 - protein, 512 aa, Homo sapiens [sequence omitted]

SEQ ID NO: 4752 - protein, 277 aa, Homo sapiens [sequence omitted]

SEQ ID NO: 4753 - protein, 528 aa, Homo sapiens [sequence omitted]

SEQ ID NO: 4754 - protein, 238 aa, Homo sapiens
MCGLSFMLFRACLKMDLGVFICVFISFSPLFKSTADCPDAVPSSAETGGTNYLAPGGLSDSQLLLEPGDRSHWCVVAYWEEKTRVGRLYCVQEPSLDIFYDLPQGNGFCLGQLNSDNKSQLVQKVRSKIGCGIQLTREVDGVWVYNRSSYPIFIKSATLDNPDSRTLLVHKVFPGFSIKAFDYEKAYSLQRPNDHEFMQQPWTGFTVQISFVKGWGQCYTRQFISSCPCWLEVIFNSR

SEQ ID NO: 4755 - protein, 307 aa, Homo sapiens [sequence omitted]

SEQ ID NO: 4756 - protein, 583 aa, Homo sapiens
MSVIVKTQEGDILLFCKGADSAVFPRVQNHEIELTKVHVERNAMDGYRTLCVAFKEIAPDDYERINRQLIEAKMALQDREEKMEKVFDDIETNMNLIGATAVEDKLQDQAAETIEALHAAGLKVWVLTGDKMETAKSTCYACRLFQTNTELLELTTKTIEESERKEDRLHELLIEYRKKLLHEFPKSTRSFKKAWTEHQEYGLIIDGSTLSLILNSSQDSSSNNYKSIFLQICMKCTAVLCCRMAPLQKAQIVRMVKNLKGSPITLSIGDGANDVSMILESHVGIGIKGKEGRQAARNSDYSVPKFKHLKKLLLAHGHLYYVRIAHLVQYFFYKNLCFILPQFLYQFFCGFSQQPLYDAAYLTMYNICFTSLPILAYSLLEQHINIDTLTSDPRLYMKISGNAMLQLGPFLYWTFLAAFEGTVFFFGTYFLFQTASLEENGKVYGNWTFGTIVFTVLVFTVTLKLALDTRFWTWINHFVIWGSLAFYVFFSFFWGGIIWPFLKQQRMYFVFAQMLSSVSTWLAIILLIFISLFPEILLIVLKNVRRRSARRNLSCRRASDSLSARPSVRPLLLRTFSDESNVL

SEQ ID NO: 4757 - protein, 171 aa, Homo sapiens
MHLWRYPSLSIHGIEGAFDEPGTKTVIPGRVIGKFSIRLVPHMNVSAVEKQVTRHLEDVFSKRNSSNKMVVSMTLGLHPWIANIDDTQYLAAKRAIRTVFGTEPDMIRDGSTIPIAKMFQEIVHKSVVLIPLGAVDDGEHSQNEKINRSADACAMCLSLLPLLHTPGSTRG

SEQ ID NO: 4758 - protein, 446 aa, Homo sapiens [sequence omitted]

SEQ ID NO: 4759 - protein, 106 aa, Homo sapiens
MVTKATFHQKTQCWACEEGVQQSFHCPCRLQAAASVERYTELLKEFLFKVQSSDWMPCWIPLLPQALITLSSCSLGKCTFYTNVRQFPQLPLLDIKEFTFLTIFQS

SEQ ID NO: 4760 - protein, 107 aa, Homo sapiens
MYLLIMEFMSFPSFAWPRFFFSLKFLLRCYLGCLHYKQAALPPLFVVTGEKPYKCTWEGCDWRFARSDELTRHYRKHTGAKPFQCGVCNRSFSRSDHLALHMKRHQN

SEQ ID NO: 4761 - protein, 667 aa, Homo sapiens
MEDLSSPDSTLLQGGHNLLSSASFQEAVTFKDVIVDFTQEEWKQLDPGQRDLFRDVTLENYTHLVSIGLQVSKPDVISQLEQGTEPWIMEPSIPVGTCADWETRLENSVSAPEPDISEEELSPEVIVEKHKRDDSWSSNLLESWEYEGSLERQQANQQTLPKEIKVTEKTIPSWEKGPVNNEFGKSVNVSSNLVTQEPSPEETSTKRSIKQNSNPVKKEKSCKCNECGKAFSYCSALIRHQRTHTGEKPYKCNECEKAFSRSENLINHQRIHTGDKPYKCDQCGKGFIEGPSLTQHQRIHTGEKPYKCDECGKAFSQRTHLVQHQRIHTGEKPYTCNECGKAFSQRGHFMEHQKIHTGEKPFKCDECDKTFTRSTHLTQHQKIHTGEKTYKCNECGKAFNGPSTFIRHHMIHTGEKPYECNECGKAFSQHSNLTQHQKTHTQEKAYECKECGKAFIRSSSLAKHERIHTGEKPYQCHECGKTFSYGSSLIQHRKIHTGERPYKCNECGRAFNQNIHLTQHKRIHTGAKPYECAECGKAFRHCSSLAQHQKTHTEEKPYQCNKCEKTFSQSSHLTQHQRIHTGEKPYKCNECDKAFSRSTHLTEHQNTHTGEKPYNCNECRKTFSQSTYLIQHQRIHSGEKPFGCNDCGKSFRYRSALNKHQRLHPGI

SEQ ID NO: 4762 - protein, 460 aa, Homo sapiens
MEVLESGEQGVLQWDRKLSELSEPGDGEALMYHTHFSELLDEFSQNVLGQLLNDPFLSEKSVSMEVEPSPTSPAPLIQAEHSYSLCEEPRAQSPFTHITTSDSFNDDEVESEKWYLSTDFPSTSIKTEPVTDEPPPGLVPSVTLTITAISTPLEKEEPPLEMNTGVDSSCQTIIPKIKLEPHEVDQFLNFSPKEAPVDHLHLPPTPPSSHGSDSEGSLSPNPRLHPFSLPQTHSPSRAAPRAPSALSSSPLLTAPHKLQGSGPLVLTEEEKRTLIAEGYPIPTKLPLSKSEEKALKKIRRKIKNKISAQESRRKKKEYMDSLEKKVESCSTENLELRKKVEVLENTNRTLLQQLQKLQTLVMGKVSRTCKLAGTQTGTCLMVVVLCFAVAFGSFFQGYGPYPSATKMALPSQHSLQEPYTASVGKTACGKLGRVLFYFPRAGFLSLPKGIFCESPMFKKW

SEQ ID NO: 4763 - protein, 443 aa, Homo sapiens
MEHVQGRIFRDLTIPGLSPAERSAIYVATVETLAQLHSLNIQSLQLEGYGIGAGYCKRQVSTWTKQYQAAAHQDIPAMQQLSEWLMKNLPDNDNEENLIHGDFRLDNIVFHPKECRVIAVLDWELSTIGHPLSDLAHFSLFYFWPRTVPMINQGSYSENSGIPSMEELISIYCRCRGINSILPNWNFFLALSYFKMAGIAQGVYSRYLLGNNSSEDSFLFANIVQPLAETGLQLSKRTFSTVLPQIDTTGQLFVQTRKGQEVLIKVKHFMKQHILPAEKEVTEFYVQNENSVDKWGKPLVIDKLKEMAKVEGLWNLFLPAVSGLSHVDYALIAEETGKCFFAPDVFNCQAPDTGNMEVLHLYGSEEQKKQWLEPLLQGNITSCFCMTEPDVASSDATNIECSIQRDEDSYVINGKKWWSSGAGNPKCKIAIVLGRTQNTSLSR

SEQ ID NO: 4764 - protein, 370 aa, Homo sapiens
MMTPQVITPQQMQQILQQQVLSPQQLQALLQQQQAVMLQQDFLDSGLENFRAALEKNQQLQEFYKKQQEQLHLQLLQQQQQQQQQQQQQQQQQQQQQQQQQQQQQQQQQQQQQQQQHPGKQAKEQQQQQQQQQQLAAQQLVFQQQLLQMQQLQQQQHLLSLQRQGLISIPPGQAALPVQSLPQAGLSPAEIQQLWKEVTGVHSMEDNGIKHGGLDLTTNNSSSTTSSNTSKASPPITHHSIVNGQSSVLSARRDSSSHEETGASHTLYGHGVCKWPGCESICEDFGQFLKHLNNEHALDDRSTAQCRVQMQVVQQLEIQLSKERERLQAMMTHLHMRPSEPKPSPKPKLPQTMNFIKMQMSDLHLLMQLS

SEQ ID NO: 4765 - protein, 379 aa, Homo sapiens
MSRGYSENNNFLNNNNQMVLDMILYPLIGIPQTINWETIARLVPGLTPKECAKRFDELKSSGSSPVDNQYNSLMAAGESPVETLATYIKSSLLDIHGEFQETPVGHDAVSKTGRHSIASTRNCSSESENCTTHNGGEMTEESEGPNMVIHVCDEAKNLKEDFTCPRDLLISEMKYFAEYLSMDAQRWEEVDISVHCDVHIFNWLIKYIKRNTKENKDCEMPTLEPGNVISILISSEFLKMDSLVEQCIQYCHKNMNAIVATPCNMNCINANLLTRIADLFSHNEVDDLKDKKDKFKSKLFCKKIERLFDPEYLNPDSRSNAATLYRCCLCKKLLTKETERRIPCIPGKINVDRRGNIVYIHIRCREDKIHTCIFVYIYI

SEQ ID NO: 4766 - protein, 155 aa, Homo sapiens [sequence omitted]

SEQ ID NO: 4767 - protein, 421 aa, Homo sapiens
MMYRTVGFGTRSRNLKPWMIAVLIVLSLTVVAVTIGLLVHFLVFDQKKEYYHGSFKILDPQINNNFGQSNTYQLKDLRETTENLVSQVDEIFIDSAWKKNYIKNQVVRLTPEEDGVKVDVIMVFQFPSTEQRAVREKKIQSILNQKIRNLRALPINASSVQVNAMSSSTGELTVQASCGKRVVPLNVNRIASGVIAPKAAWPWQASLQYDNIHQCGATLISNTWLVTAAHCFQKYKNPHQWTVSFGTKINPPLMKRNVRRFIIHEKYRSAAREYDIAVVQVSSRVTFSDDIRRICLPEASASFQPNLTVHITGFGALYYGGESQNDLREARVKIISDDVCKQPQVYGNDIKPGMFCAGYMEGIYDACRGDSGGPLVTRDLKDTWYLIGIVSWGDNCGQKDKPGVYTQVTYYRNWIASKTGI

SEQ ID NO: 4768 - protein, 495 aa, Homo sapiens
MAAEPQPSSLSYRTTGSTYLHPLSELLGIPLDQVNFVVCQLVALFAAFWFRIYLRPGTTSSDVRHAVATIFGIYFVIFCFGWYSVHLFVLVLMCYAIMVTASVSNIHRYSFFVAMGYLTICHISRIYIFHYGILTTDFSGPLMIVTQKITTLAFQVHDGLGRRAEDLSAEQHRLAIKVKPSFLEYLSYLLNFMSVIAGPCNNFKDYIAFIEGKHIHMKLLEVNWKRKGFHSLPEPSPTGAVIHKLGITLVSLLLFLTLTKTFPVTCLVDDWFVHKASFPARLCYLYVVMQASKPKYYFAWTLADAVNNAAGFGFSGVDKNGNFCWDLLSNLNIWKIETATSFKMYLENWNIQTATWLKCVCYQRVPWYPTVLTFILSALWHGVYPGYYFTFLTGILVTLAARAVRNNYRHYFLSSRALKAVYDAGTWAVTQLAVSYTVAPFVMLAVEPTISLYKSMYFYLHIISLLIILFLPMKPQAHTQRRPQTLNSINKRKTD

SEQ ID NO: 4769 - protein, 953 aa, Homo sapiens [sequence omitted]

SEQ ID NO: 4770 - protein, 331 aa, Homo sapiens
MNVKNVGKLNQSSDLLRHHRIHSGEKPYVCNKCGESFRSSSDLIKHHRVHTGEKPHECSECGKVFSQRSHLVTHQKIHTGEKPYQCTECEKAFRRRSLLIQRRRIHSGEKPCECKECGKLFMWHTAFLKHQRLHAGEKLEECEKTFSKDEELRGEQKIHQEEKAYWCNQCGRAFQGSSDLIGHQVTHTGEKPYECKECGKTFNQSSDLLRHHRIHSGEKPYVCNKCGKSFRGSSDLIRHHRVHTGEKPYECPECWKAFSQNSHLVSHQRIHTREKPFECSNCGKAFSGWTAFLKHQKLHIGKEFEDCKSLQTGPILIGSRNLMNAVKLGKV

SEQ ID NO: 4771 - protein, 1099 aa, Homo sapiens
MAHLGPTPPPHSLNYKSEDRLSEQDWPAYFKVPCCGVDTSQIESEEAEVDVRERETQRDREPKRARDLTLRDSCTDNSMQFGTRTTTAEPGFMGTWQNADTNLLFRMSQQAIRCTLVNCTCECFQPGKINLRTCDQCKHGWVAHALDKLSTQHLYHPTQVEIVQSNVVFDISSLMLYGTQAVPVRLKILLDRLFSVLKQEEVLHILHGLGWTLRDYVRGYILQDAAGKVLDRWAIMSREEEIITLQQFLRFGETKSIVELMAIQEKEGQAVAVPSSKTDSDIRTFIESNNRTRSPSLLAHLENSNPSSIHHFENIPNSLAFLLPFQYINPVSAPLLGLPPNGLLLEQPGLRLREPSLSTQNEYNESSESEVSPTPYKNDQTPNRNALTSITNVEPKTEPACVSPIQNSAPVSDLTKTEHPKSSFRIHRMRRMGSASRKGRVFCNACGKTFYDKGTLKIHYNAVHLKIKHRCTIEGCNMVFSSLRSRNRHSANPNPRLHMPMLRNNRDKDLIRATSGAATPVIASTKSNLALTSPGRPPMGFTTPPLDPVLQNPLPSQLVFSGLKTVQPVPPFYRSLLTPGEMVSPPTSLPTSPIIPTSGTIEQHPPPPSEPVVPAVMMATHEPSADLAPKKKPRKSSMPVKIEKEIIDTADEFDDEDDDPNDGGAVVNDMSHDNHCHSQEEMSPGMSVKDFSKHNRTRCISRTEIRRADSMTSEDQEPERDYENESESSEPKLGEESMEGDEHIHSEVSEKVLMNSERPDENHSEPSHQDVIKVKEEFTDPTYDMFYMSQYGLYNGGGASMAALHESFTSSLNYGSPQKFSPEGDLCSSPDPKICYVCKKSFKSSYSVKLHYRNVHLKEMHVCTVAGCNAAFPSRRSRDRHSANINLHRKLLTKELDDMGLDSSQPSLSKDLRDEFLVKIYGAQHPMGLDVREDASSPAGTEDSHLNGYGRGMAEDYMVLDLSTTSSLQSSSSIHSSRESDAGSDEGILLDDIDGASDSGESAHKAEAPALPGSLGAEVSGSLMFSSLSGSNGGIMCNICHKMYSNKGTLRVHYKTVHLREMHKCKVPGCNMMFSSVRSRNRHSQNPNLHKNIPFTSVD

SEQ ID NO: 4772 - protein, 247 aa, Homo sapiens
MGGAGRGVGEGRGRGGGGRRWRAVMAAGDGDVKLGTLGSGSESSNDGGSESPGDAGAAAEGGGWAAAALALLTGGGEMLLNVALVALVLLGAYRLWVRWGRRGLGAGAGAGEESPATSLPRMKKRDFSLEQLRQYDGSRNPRILLAVNGKVFDVTKGSKFYGPAGPYGIFAGRDASRGLATFCLDKDALRDEYDDLSDLNAVQMESVREWEMQFKEKYDYVGRLLKPGEEPSEYTDEEDTKDHNKQD

SEQ ID NO: 4773 - protein, 705 aa, Homo sapiens [sequence omitted]

SEQ ID NO: 4774 - protein, 907 aa, Homo sapiens
MQYQCKKCNVVFPRIFDLITHQKKQCYKDEDDDAQDESQTEDSMDATDQVVYKHCTVSGQTDAAKNAAAPAASSGSGTSTPLIPSPKPEPEKTSPKPEYPAEKPKQSDPSPPSQGTKPALPLASTSSDPPQASTAQPQPQPQPPKQPQLIGRPPSASQTPVPSSPLQISMTSLQNSLPPQLLQYQCDQCTVAFPTLELWQEHQHVHFLAAQNQFLHSPFLERPMDMPYMIFDPNNPLMTGQLLGSSLTQMPPQASSSHTTAPTTVAASLKRKLDDKEDNNCSEKEGGNSGEDQHRDKRLRTTITPEQLEILYEKYLLDSNPTRKMLDHIAREVGLKKRVVQVWFQNTRARERKGQFRAVGPAQSHKRCPFCRALFKAKSALESHIRSRHWNEGKQAGYSLPPSPLISTEDGGESPQKYIYFDYPSLPLTKIDLSSENELASTVSTPVSKTAELSPKNLLSPSSFKAECSEDVENLNAPPAEAGYDQNKTDFDETSSINTAISDATTGDEGNTEMESTTGSSGDVKPALSPKEPKTLDTLPKPATTPTTEVCDDKFLFSLTSPSIHFNDKDGDHDQSFYITDDPDDNADRGETSSIADPSSPNPFGSSNPFKSKSNDRPGHKRFRTQMSNLQLKVLKACFSDYRTPTMQECEMLGNEIGLPKRVVQVWFQNARAKEKKFKINIGKPFMINQGGTEGTKPECTLCGVKYSARLSIRDHIFSKQHISKVRETVGSQLDREKDYLAPTTVRQLMAQQELDRIKKASDVLGLTVQQPGMMDSSSLHGISLPTAYPGLPGLPPVLLPGMNGPSSLPGFPQNSNTLTPPGAGMLGFPTSATSSPALSLSSAPTKPLLQTPPPPPPPPPPPPSSSLSGQQTEQQNKESEKKQTKPNKVKKIKEEELEATKPEKHP

SEQ ID NO: 4775 - protein, 412 aa, Homo sapiens
MTFTFQSEDLKRDCGKKMSHQHVFSLAMEEDVKTADTKKASRILDHEKENTRSICLLEQKRKVVSSNIDVPPARKSSEELDMDKVTAAMVLTSLSTSPLVRSPPVRPNESLSGSWKEGGCVPSSTSSSGYWSWSAPSDQSNPSTPSPPLSADSFKPFRSPAQPDDGIDEAEASNLLFDEPIPRKRKNSMKVMFKCLWKNCGKVLSTAAGIQKHIRTIHLGRVGDSDYSDGEEDFYYTEIKLNTDSVADGLSSLAPVSPSQSLASPPTFPIPDSSRTETPCAKTETKLMTPLSRSAPTTLYLVHTDHAYQATPPVTIPGSAKFTPNGSSFSISWQSPPVTFTGIPVSPTHHPVGTGEQRQHAHTVLSSPPRGTVSLRKPRGEGKKCRKVYGMENRDMWCTACRWKKACQRFLD

SEQ ID NO: 4776 - protein, 314 aa, Homo sapiens
MTGSNSHITILTLNVNGLNAPIKRHRLANWIKSQDPSVCCIQETHLTCRDTHRLKIKGWRKIYQASGKQKKAGVAILVSDKTDFKPTKIKRDKEGHYTMVKGSIQQEELTILNIYAPNTGAPRFIKQVLSDVQRDLDSHTLIMGDFNTPLSTLDRSTRQKVNKHTQEFNSALHQADLIDIYKTLHPKSTEYTFFSAPHHTYSKIDHIFGSKALFSKCKRTEIITNCLSEHSAIKLELRIKNLTQNRSTTWKLNNLLLNDYWVHNEMKAEIKMFFETNENKDTTYQNLWDAFKAVCTGKFIALNAHKRKKERKKE

SEQ ID NO: 4777 - protein, 264 aa, Homo sapiens
MTGSNSHITILTLNVNGLNTPIKRHRLASWIKSQDPSVCCIQETHLICKDAYRLKIKGWRKIYQANRKQKKAGVAILVSDKSDFKPTKIKRDKKGHYIMVKGSMQQEELTILNIYAPNTGAPRFINEVLRDPQRNLDSHTIIMGDFNTPLSIFDRSTRQKVNKDTQDLNLTLQQADLRDIYRTLHPKSTEYTFFSALHHTYSKTDHILGSKALLSKCKRTEITTNCLSDHSAIKLELRIKKLTQYHISTWKLNNLLLNDYWVNN

SEQ ID NO: 4778 - protein, 852 aa, Homo sapiens
MLITERKHFRSGRIAQSMSEANLIDMEAGKVSKSCNITECQDPDLLHNWPDAFTLRGNNASKVANPFWNQLSASNPFLDDITQLRNNRKRNNISILKEDPFLFCREIENGNSFDSSGDELDVHQLLRQTSSRNSGRSKSVSELLDILDDTAHAHQSIHNSDQILLHDLEWPKNDREAYKMAWLSQRQLARSCLDLNTISQSPGWAQTQLAEVTIACKVNHQGGSVQLPESDITVHVPQGHVAVGEFQEVSLRAFLDPPHMLNHNLSCTVSPLLEIMLGNLNTMEALLLEMKIGAEVRKDPFSQVMTEMVCLHSLGKEGPFKVLSNCYIYKDTIQVKLIDLSQVMYLVVAAQAKALPSPAATIWDYIHKTTSIGIYGPKYIHPNFTVVLTVCGHNYMPGQLTISDIKKGGKNISPVVFQLWGKQSFLLDKPQDLSISIFSCDPDFEVKTEGERKEIKQKQLEAGEVVHQQFLFSLVEHREMHLFDFCVQVEPPNGEPVAQFSITTPDPTPNLKRLLNLPGYLQKKEEIKSAPLSPKILVKYPTFQDKTLNFSNYGVTLKAVLRQSKIDYFLEYFKGDTIALLGEGKVKAIGQSKVKEWYVGVLRGKIGLVHCKNVKVISKEQVMFMSDSVFTTRNLLEQIVLPLKKLTYIYSVVLTLVSEKVYDWKVLADVLGYSHLSLEDFDQIQADKESEKVSYVIKKLKEDCHTERNTRKFLYELIVALLKMDCQELVARLIQEAAVLTSAVKLGKGWRELAEKLVRLTKQQMEAYEIPHRGNTGDVAVEMMWKPAYDFLYTWSAHYGNNYTDVLQDLQSALDRMKNPVTKHWRELTGVLILVNSLEVLRVTAFSTSEEV

SEQ ID NO: 4779 - protein, 865 aa, Homo sapiens
MSLQDSTLSREGKPEGEIMAAVFFSVGRLSPEVTQPDEDLHLQAEETQLVKESVTFKDVAIDFTLEEWRLMDPTQRNLHKDVMLENYRNLVSLGLAVSKPDMISHLENGKGPWVTVREISRIPYPDMEPKPATKNATRTKAISEDLSQEAILEKLTENGLWDSRMEGLWKWNDRILRLQNNQENHLSQRIIPLKKTPTSQRGFRFESILIPEPGIATEELHSRCQTQEENFTENLNLITDTHLGKIICKEMKGSKAIRQTSELTLGKKSNNKEKPYKCSTCEKAFHYRSLLIQHQRTHTKEKPYECNECGKTFSQPSYLSQHKKIHTGEKPYKCNECGKAFIASSSLMVHQRIHTKEKPYQCNVCGKSFSQCARLNQHQRIQTGEKPYKCSECGKAFSDKSKLARHQETHNGEKPYKCDDCGKAFRNKSYLSVHQKTHTEEKPYQCNECGKSFKNTTIFNVHQRIHTGEKPFRCNECGKAYRSNSSLIVHIRTHTGEKPYECNECGKAFNRIANFTEHQRIHTGEKPYKCNECGKAFINYSCLTVHHRMHTGEKPYKCTECGKAFMRSSSLIIHQCIHTEEKPYLCNECGESFRIKSHLTVHQRIHTGEKPYKCTDCERAFTKMVNLKEHQKIHTGVKPYKCYDCGKSFRTKSYLIVHQRTHTGEKPYKCNECEKAFTNTSQLTVHQRRHTGEKPYKCNECGKVFTSNSGFNTHQRTHTGEKPFKCNDCGKAFSQMVHVTEHQKIHSGEKPYKCDVCGKAFRRGSYLTVHWRTHTGEKPYTCKECGKGCITLSQLTLHQRIHTGERPYKCEECGKAFRTNSDFTVHLRMHTGEKPYKCNECGKAFRSSSSLTVHQRIHQRETQLI

SEQ ID NO: 4780 - protein, 547 aa, Homo sapiens
MLEGRQTPASTLEQDATDYRLRSLRKLLAQPREGLLAPFSKRNSTASFPGRTSHIPVQQPEKRKQKPSPEPSQDSPHSDKWPPGHPVKNLPQMRGPRPRPAGDSPRKTQWLNQVESYIAEQRRGDRMRPQAPGRGWHGEEEVVAAAGQEGQVEGEEEGEEEEEEEDMSEVFEYVPVFDPVVNWDQTFSARNLDFQALRTDWIDLSCNTSGNLLLPEQEALEVTRVFLKKLNQRSRGRYQLQRIVNVEKRQDQLRGGRYLLELELLEQGQRVVRLSEYVSARGWQGIDPAGGEEVEARNLQGLVWDPHNRRRQVLNTRAQEPKLCWPQGFSWSHRAVVHFVVPVKNQARWVQQFIKDMENLFQVTGDPHFNIVITDYSSEDMDVEMALKRSKLRSYQYVKLSGNFERSAGLQAGIDLVKDPHSIIFLCDLHIHFPAGVIDAIRKHCVEGKMAFAPMVMRLHCGATPQWPEGYWEVNGFGLLGIYKSDLDRIGGMNTKEFRDRWGGEDWELLDRILQAGLDVERLSLRNFFHHFHSKRGMWSRRQMKTL

SEQ ID NO: 4781 - protein, 443 aa, Homo sapiens [sequence omitted]

SEQ ID NO: 4782 - protein, 649 aa, Homo sapiens
MMWQCHLSAQDYRYYPVDGYSLLKRFPLHPLTGPRCPVQTVGQWLESIGLPQYENHLMANGFDNVQFMGSNVMEDQDLLEIGILNSGHRQRILQAIQLLPKMRPIGHDGYHPTSVAEWLDSIELGDYTKAFLINGYTSMDLLKKIWEVELINEWNITKLSIEYDSEPFGKERDAAIKKLATEAGVEVIVRISHTLYDLDKIIELNGGQPPLTYKRFQTLISKMEPLEIPVETITSEVIEKCTTPLSDDHDEKYGVPSLEELGFDTDGLSSAVWPGGETEALTRLERHLERKAWVANFERPRMNANSLLASPTGLSPYLRFGCLSCRLFYFKLTDLYKKVKKNSSPPLSLYGQLLWREFFYTAATNNPRFDKMEGNPICVQIPWDKNPEALAKWAEGRTGFPWIDAIMTQLRQEGWIHHLARHAVACFLTRGDLWISWEEGMKVFEELLLDADWSINAGSWMWLSCSSFFQQFFHCYCPVGFGRRTDPNGDYIRRYLPVLRGFPAKYIYDPWNAPEGIQKVAKCLIGVNYPKPMVNHAEASRLNIERMKQIYQQLSRYRGLGLLASVPSNPNGNGGFMGYSAENIPGCSSSGSCSQGSGILHYAHGDSQQTHLLKQGRSSMGTGLSGGKRPSQEEDTQSIGPKVQRQSTN

SEQ ID NO: 4783 - protein, 337 aa, Homo sapiens
MPGLPCPALPCPAPPPAPSCLIAMALKNSKTGSLPVSEIYSFMKEHFPYFKTAPDGWKNSVRHNLSLNKCFEKVENKMSGSSRKGCLWALNLARIDKMEEEMHKWKRKDLAAIHRSMANPEELDKLISDRPESCRRPGKPGEPEAPVLTHATTVAVAHGCLAVSQLPPQPLMTLSLQSVPLHHQVQPQAHLAPDSPAPAQTPPLHALPDLSPSPLPHPAMGRAPVDFINISTDMNTEVDALDPSIMDFALQGNLWEEMKDEGFSLDTLGAFADSPLGCDLGASGLTPASGGSDQSFPDLQVTGLYTAYSTPDSVAASGTSSSSQYLGAQGNKPIALL

SEQ ID NO: 4784 - protein, 594 aa, Homo sapiens
MECYYIVISSTHLSNGHFRNIKGVFRGPLSKNGNKTLDYAEKENTIAKALEDLKANFYCELCDKQYYKHQEFDNHINSYDHAHKQRLKELKQREFARNVASKSRKDERKQEKALQRLHKLAELRKETVCAPGSGPMFKSTTVTVRENCNEISQRVVVDSVNNQQDFKYTLIHSEENTKDATTVAEDPESANNYTAKNNQVGDQAQGIHRHKIGFSFAFPKKASVKLESSAAAFSEYSDDASVGKGFSRKSRFVPSACHLQLSSPTDVLLSSEEKTNSFHPPEAMCRDKETVQTQEIKEVSSEKDALLLPSFCKFQLQLSSDADNCQNSVPLADQIPLESVVINEDIPVSGNSFELLGNKSTVLDMSNDCISVQATTEENVKHNEASTTEVENKNGPETLAPSNTEEVNITIHKKTNFCKRQCEPFVPVLNKHRSTVLQWPSEMLVYTTTKPSISYSCNPLCFDFKSTKVNNNLDKNKPDLKDLCSQQKQEDICMGPLSDYKDVSTEGLTDYEIGSSKNKCSQVTPLLADDILSSSCDSGKNKNTGQRYKNISCKIRETEKYNFTKSQIKQDTLDEKYNKIRLKETHEYWFHKSR

SEQ ID NO: 4785 - protein, 118 aa, Homo sapiens
MITFYFLFLFSFLSFFFFFFFETEFCSSCPGWSNGTILAHRNLHLPGSSDSPPSAFPSSWDYRHAPPSPANFVFLVDMGLLHVGQAGLELPTSGDPPTSASQSAGITGVSHCARPLFS

SEQ ID NO: 4786 - protein, 491 aa, Homo sapiens
MAYLYSSDAFLEGYVQQFLYTFRYFCTPHDFLHFLLDRINSTLTRAHQDPTSTFTKIYRRSLCVLQAWVEDCYAVDFPRNSGLLGKLEDFISSKILPLDGSAKHLLGLLEVGMDRRAEGNPRGTDLENPREAEEDARPFNALCKRLSEDGISRKSFPWRLPRGNGLVLPPHKERPYTIAAALPKPCFLEDFYGPCAKTSEKGPYFLTEYSTHQLFSQLTLLQQELFQKCHPVHFLNSRALGVMDKSTAIPKASSSESLSAKTCSLFLPNYVQDKYLLQLLRNADDVSTWVAAEIVTSHTSKLQVNLLSKFLLIAKSCYEQRNFATAMQILSGLEHLAVRQSPAWRILPAKIAEVMEELKAVEVFLKSDSLCLMEGRRFRAQPTLPSAHLLAMHIQQLETGGFTMTNGAHRWSKLRNIAKVVSQVHAFQENPYTFSPDPKLQSYLKQRIARFSGADISTLAADSRANFHQVSSEKHSRKIQDKLRRMKATFQ

SEQ ID NO: 4787 - protein, 415 aa, Homo sapiens [sequence omitted]

SEQ ID NO: 4788 - protein, 974 aa, Homo sapiens
MRRAGIGEDSRLGLQAQPGAEPSPGRAGTERSLGGAQGPGQPCSCPGAMASAVRGSRPWPRLGLQLQFAALLLGTLSPQVHTLRPENLLLVSTLDGSLHALSKQTGDLKWTLRDDPVIEGPMYVTEMAFLSDPADGSLYILGTQKQQGLMKLPFTIPELVHASPCRSSDGVFYTGRKQDAWFVVDPESGETQMTLTTEGPSTPRLYIGRTQYTVTMHDPRAPALRWNTTYRRYSAPPMDGSPGKYMSHLASCGMGLLLTVDPGSGTVLWTQDLGVPVMGVYTWHQDGLRQLPHLTLARDTLHFLALRWGHIRLPASGPRDTATLFSTLDTQLLMTLYVGKDETGFYVSKALVHTGVALVPRGLTLAPADGPTTDEVTLQVSGEREGSPSTAVRYPSGSVALPSQWLLIGHHELPPVLHTTMLRVHPTLGSGTAETRPPENTQAPAFFLELLSLSREKLWDSELHPEEKTPDSYLGLGPQDLLAASLTAVLLGGWILFVMRQQQPQVVEKQQETPLAPADFAHISQDAQSLHSGASRRSQKRLQSPSKQAQPLDDPEAEQLTVVGKISFNPKDVLGRGAGGTFVFRGQFEGRAVAVKRLLRECFGLVRREVQLLQESDRHPNVLRYFCTERGPQFHYIALELCRASLQEYVENPDLDRGGLEPEVVLQQLMSGLAHLHSLHIVHRDLKPGNILITGPDSQGLGRVVLSDFGLCKKLPAGRCSFSLHSGIPGTEGWMAPELLQLLPPDSPTSAVDIFSAGCVFYYVLSGGSHPFGDSLYRQANILTGAPCLAHLEEEVHDKVVARDLVGAMLSPLPQPRPSAPQVLAHPFFWSRAKQLQFFQDVSDWLEKESEQEPLVRALEAGGCAVVRDNWHEHISMPLQTDLRKFRSYKGTSVRDLLRAVRNKKHHYRELPVEVRQALGQVPDGFVQYFTNRFPRLLLHTHRAMRSCASESLFLPYYPPDSEARRPCPGATGR

SEQ ID NO: 4789 - protein, 794 aa, Homo sapiens [sequence omitted]

SEQ ID NO: 4790 - protein, 692 aa, Homo sapiens
MKEFLSTAQGNREVFHAGTLQIHESHHNGDFCYQDVDKDIHDYEFQWQEDERNGHEAPMTKIKKLTGSTERYDQSHARNKPIKDQLGSSFHSHLPEMHIFQTEEKIDNQVVKSIHDASLVSTAQRISCRPKTHISNNHGNNFWNSSLLTQKQEVHMREKSFQCNESGKAFNYSSLLRKHQIIHLADKYKCDVCGKLFNQKRNLACHRRCHTGENPYKCNECGKTFSQTSSLTCHRRLHTGEKPYKCEECDKAFHFKSILERHSIIHTEEKPYKCNECGKTFRQKSILTRHHRLHTGEKPYKCNECGKTFSHKSSLTCHHRLHTGEKPYKCNECGKTFSHKSSLTCHRRLHTGEKPYKCEECDKAYSFRSNFEIHRKIHTEDNAYKCNECGKTFSRTSSLTCHRRRHTGEQPYKCEECDKAFRFKSNLERHRRIHTGEKPYKCNECGKTFSRKSYLTCHHRLHTGEKAYKCNECGKTFSWKSSLTCHRRLHSGEKPYKCKECGKTFNQQLTLKRHRRLHSGENPYKCEDSDKAYSFKSNLEIHQKIHTEENPYKCNECGKTFSRTSSLTCHRRLHTGEKPYKCEECDKAFRVKSNLEGHRRIHTGEKPYKCNECGKTFSRKSYFICHHRLHTGEKPYKCNECGKNFSQKSSLICHHRLHTGEKPYKCNECGKTFSQKSNLTCHRRLHTGEKQV

SEQ ID NO: 4791 - protein, 872 aa, Homo sapiens [sequence omitted]

SEQ ID NO: 4792 - protein, 1015 aa, Homo sapiens [sequence omitted]

SEQ ID NO: 4793 - protein, 445 aa, Homo sapiens
MKNPEAQQDVSVSQGFRMLFYTMKPSETSFQTLEEVPDYVKKATPFFISLMLLELVVSWILKGKPPGRLDDALTSISAGVLSRLPSLFFRSIELTSYIYIWENYRLFNLPWDSPWTWYSAFLGVDFGYYWFHRMAHEVNIMWAGHQTHHSSEDYNLSTALRQSVLQIYTSWIFYSPLALFIPPSVYAVHLQFNLLYQFWIHTEVINNLGPLELILNTPSHHRVHHGRNRYCIDKNYAGVLIIWDKIFGTFEAENEKVVYGLTHPINTFEPIKVQFHHLFSIWTTFWATPGFFNKFSVIFKGPGWGPGKPRLGLSEEIPEVTGKEVPFSSSSSQLLKIYTVVQFALMLAFYEETFADTAALSQVTLLLRVCFIILTLTSIGFLLDQRPKAAIMETLRCLMFLMLYRFGHLKPLVPSLSSAFEIVFSICIAFWGVRSMKQLTSHPWK

SEQ ID NO: 4794 - protein, 735 aa, Homo sapiens
MTCLICIASVKRNQAVWSCSGCFCIFHMPCIQKWAKDSQFLVSSVTDDDFGKKDCPWPCPKCRFEYKRSETPSRYYCYCGKVEDPPLDPWLVPHSCGQVCEREFKPPCGHKCLLLCHPGPCPPCPKMVTTTCYCKKAKPIPRRCSAKEWSCQLPCGQKLLCGQHKCENPCHAGSCQPCPRVSRQKCVCGKKVAERSCASPLWHCDQVCGKTLPCGNHTCEQVCHVGACGECPRSGKRFCPCQKSKFSLPCTEDVPTCGDSCDKVLECGIHRCSQRCHRGPCETCRQEVEKHCRCGKHTKRMPCHKPYLCETKCVKMRDCQKHQCRRKCCPGNCPPCDQNCGRTLGCRNHKCPSVCHRGSCYPCPETVDVKCNCGNTKVTVPCGRERTTRPPKCKEQCSRPPTCHHTSQEKHRCHFGSCPPCHQPCQKVLEKCGHLCPAPCHDQALIKQTGRHQPTGPWEQPSEPAFIQTALPCPPCQVPIPMECLGKHEVSPLPCHAVGPYSCKRVCGRILDCQNHTCMKECHKVTKTDGCTGKNKAGPECLHCEEGCSKSRPLGCLHPCILRCHPGECPPCVQMLRIKCHCKITSLYVECRKITTADVNEKNLLSCCKNQCPKELPCGHRCKEMCHPGECPFNCNQKVKLRCPCKRIKKELQCNKVRENQVSIECDTTCKEMKRKASEIKEAEAKAALEEEKRRQQAELEAFENRLKGRRKKNRKRDEVAVELSLWQKHKYYLI

SEQ ID NO: 4795 - protein, 578 aa, Homo sapiens
MPGPHLSLSAISMSLSLHLFLLPLSLYFFSSLLHFQSLLLCLLVSRFCVSISLTCISMSSFVLFSMSLGRHHLLPTKSPYPHAYTSLLSLPQFNPELVLVSAGFDAARGDPLGGCQVSPEGYAHLTHLLMGLASGRIILILEGGYNLTSISESMAACTRSLLGDPPPLLTLPRPPLSGALASITETIQVHRRYWRSLRVMKVEDREGPSSSKLVTKKAPQPAKPRLAERMTTREKKVLEAGMGKVTSASFGEESTPGQTNSETAVVALTQDQPSEAATGGATLAQTISEAAIGGAMLGQTTSEEAVGGATPDQTTSEETVGGAILDQTTSEDAVGGATLGQTTSEEAVGGATLAQTTSEAAMEGATLDQTTSEEAPGGTELIQTPLASSTDHQTPPTSPVQGTTPQISPSTLIGSLRTLELGSESQGASESQAPGEENLLGEAAGGQDMADSMLMQGSRGLTDQAIFYAVTPLPWCPHLVAVCPIPAAGLDVTQPCGDCGTIQENWVCLSCYQVYCGRYINGHMLQHHGNSGHPLVLSYIDLSAWCYYCQAYVHHQALLDVKNIAHQNKFGEDMPHPH

SEQ ID NO: 4796 - protein, 108 aa, Homo sapiens
MGTDEDCYQERGDWDQESGFGREEPRLLFWMCQDRSAFEKSELWYQIASWICETGVWGKERPWLKNVSFGNVNIKPQDWVTWPSRGVGTEKRPWPEPWGHLHLGEKGM

SEQ ID NO: 4797 - protein, 142 aa, Homo sapiens
MAPVKISHVVSFSSQDPKYPVENLLNPDSPRRPWLGCPQDKSGQLKVELQLERAVPTGYIDVGNCGCAFLQIDVGHSSWPLDRPFITLLPATTLMSLTDSKQGKNRSGVRMFKDGKEGKSRKDGGGLYEKQRCSTKEDCECY

SEQ ID NO: 4798 - protein, 153 aa, Homo sapiens [sequence omitted]

SEQ ID NO: 4799 - protein, 787 aa, Homo sapiens [sequence omitted]

SEQ ID NO: 4800 - protein, 221 aa, Homo sapiens
MSGEATVLAYHAPEEQEGLLVVKVEEENYVLDQDFGLQENPWSQEVFRQKFRQFSYSDSTGPREALSRLRELCCQWLRPEVHSKEQILELLMLEQFLAILPEELQAWLREHRPENGEEAVTMLEELEKELEEPRQQDTTHGQEMFWQEMTSTGALKSLSLNSPVQPLENQCKTETQESQAFQERDGVSLCHPGWSAVVQPQLTAVALNPWVKVILLPQPPE

SEQ ID NO: 4801 - protein, 1043 aa, Homo sapiens [sequence omitted]

SEQ ID NO: 4802 - protein, 422 aa, Homo sapiens
MPLWEAPSDHPANPPATLQGHTSLPGCQEEPARDPQSGLPQITSESSSFSEGSLPSWSSGPAGAKLNASHEGIGSSSDGNGDSKAATERVVSAMDTVRRKHPEITFYILVKAIYTLGYSVSLMSLATGSIILCLFRKLHCTRNYIHLNLFLSFILRAISVLVKDDVLYSSSGTLHCPDQPSSWVGCKLSLVFLQYCIMANFFWLLVEGLYLHTLLVAMLPPRRCFLAYLLIGWGLPTVCIGAWTAARLYLEDTGCWDTNDHSVPWWVIRIPILISIIVNFVLFISIIRILLQKLTSPDVGGNDQSQYKRLAKSTLLLIPLFGVHYMVFAVFPISISSKYQILFELCLGSFQGLVVAVLYCFLNSEVQCELKRKWRSRCPTPSASRDYRVCGSSFSRNGSEGALQFHRGSRAQSFLQTETSVI

SEQ ID NO: 4803 - protein, 310 aa, Homo sapiens
MPSSKPGSPAPQDPSPSCRTCSNQVQPGHLLLPLTKASLTGPSPPPAKLGRAQGAPSPKGPLEIGWSPDAQPLRLGETFLPKGVAQLSRASSSGHKVGFLQPWPPHPLLPQERVPRHQRQCCPRAGPAFGCLRGRPGGWPATGSGGRQQGRKMGHPPVSPSAPAPAGTTAIPGLIPDLVAGTPWPRWALIAGALAAGVLLVSCLLCAACCCCRRHRKKPRDKESVGLGSARGTTTTHLVQPDVDGLESSPGDAQQWGRLQLSLEFDFGSQEVKGPAAQDQRFCEFPERVTGEGQTPCPGWWGADRAGALG

SEQ ID NO: 4804 - protein, 872 aa, Homo sapiens [sequence omitted]

SEQ ID NO: 4805 - protein, 530 aa, Homo sapiens [sequence omitted]

SEQ ID NO: 4806 - protein, 134 aa, Homo sapiens
MLRDFVTTRPALQEALKEALNMERKNRYQPLQKPYQNMKTNEAIKKLHQLMCKITRSNSHITILTLSVNWLNAPIKKHRLANWIKSQDPSVCCIQETHLMCKDTHRPKIKGWRNIYQANGKPKKKKSGGCNPSL

SEQ ID NO: 4807 - protein, 505 aa, Homo sapiens
MAGAQTLLTFRDVAIEFSLEEWKCLDLAQQNLYRDVMLENYRNLFSVGLTVCKPGLITCLEQRKEPWNVKRQEAADGHPAMSSHFTQDLLPEQGIQDAFPKRILRGYGNCGLDNLYLRKDWESLDECKLQKDYNGLNQCSSTTHSKIFQYNKYVKIFDNFSNLHRRNISNTGEKPFKCQECGKSFQMLSFLTEHQKIHTGKKFQKCGECGKTFIQCSHFTEPENIDTGEKPYKCQECNNVIKTCSVLTKNRIYAGGEHYRCEEFGKVFNQCSHLTEHEHGTEEKPFKCEECDSIFKWFSDLTKHKRIHTGEKPYKCDECGKAYTQSSHLSEHRRIHTGEKPYQCEECGKVFRTCSSLSNHKRTHSEEKPYTCEECGNIFKQLSDLTKHKKTHTGEKPYKCDECGKNFTQSSNLIVHKRIHTGEKPYKCEECGRVFMWFSDITKHKKTHTGEKPYKCDECGKNFTQSSNLIVHKRIHTGEKPYKCEKCGKAFTQFSHLTVHESIHT

SEQ ID NO: 4808 - protein, 106 aa, Homo sapiens [sequence omitted]

SEQ ID NO: 4809 - protein, 410 aa, Homo sapiens [sequence omitted]

SEQ ID NO: 4810 - protein, 340 aa, Homo sapiens
MAMQMQLEANADTSVEEESFGPQPISRLEQCGINANDVKKLEEAGFHTVEAVAYAPKKELINIKGISEAKADKILTESRSVARLECNSVILVYCTLRLSGSSDSPASASRVVGTTGGIETGSITEMFGEFRTGKTQICHTLAVTCQLPIDRGGGEGKAMYIDTEGTFRPERLLAVAERYGLSGSDVLDNVAYARAFNTDHQTQLLYQASAMMVESRYALLIVDSATALYRTDYSGRGELSARQMHLARFLRMLLRLADEFGVAVVITNQVVAQVDGAAMFAADPKKPIGGNIIAHASTTRLYLRKGRGETRICKIYDSPCLPEAEAMFAINADGVGDAKD

SEQ ID NO: 4811 - protein, 698 aa, Homo sapiens [sequence omitted]

SEQ ID NO: 4812 - protein, 544 aa, Homo sapiens
MDGLDNRGEIVVIGATNRLDSIDPALRRPGRFDREFLFNLPDQKARKHILQIHTRDWNPKLSDAFLGELAEKCVGYCGADIKALCTEAALIALRRRYPQIYASSHKLQLDVSSIVLSAQDFYHAMQNIVPASQRAVMSSGHALSPIIRPLLERSFNNILAVLQKVFPHAEISQSDKKEDIETLILEDSEDENALSIFETNCHSGSPKKQSSSAAIHKPYLHFTMSPYHQPTSYRPRLLLSGERGSGQTSHLAPALLHTLERFSVHRLDLPALYSVSAKTPEESCAQIFREARRTVPSIVYMPHIGDWWEAVSETVRATFLTLLQDIPSFSPIFLLSTSETMYSELPEEVKCIFRIQYEEVLYIQRPIEEDRRKFFQELILNQASMAPPRRKHAALCAMEVLPLALPSPPRQLSESEKSRMEDQEENTLRELRLFLRDVTKRLATDKRFNIFSKPVDIEEVSDYLEVIKEPMDLSTVITKIDKHNYLTAKDFLKDIDLICSNALEYNPDKDPGDKIIRHRACTLKDTAHAIIAAELDPEFNKLCE

SEQ ID NO: 4813 - protein, 334 aa, Homo sapiens
MVGQGCSLEPRLDLRPLGNPRSKQSRHQSWVWERQEGERNGGSKEGKEGGRGGSKTVIPIPISDLELASTPVHPCRGGPSPQLLPREYGGGVGILWLSSLPLLCRLMLGFMGVTALLSMWISNTATTAMMVPIVEAILQQMEATSAATEAGLELVDKGKAKELPGSQVIFEGPTLGQQEDQERKRLCKAMTLCICYAASIGGTATLTGTGPNVVLLGQMNELFPDSKDLVNFASWFAFAFPNMLVMLLFAWLWLQFVYMRFNFKKSWGCGLESKKNEKAALKVLQEEYRKLGPLSFAEINVLICFFLLVILWFSRDPGFMPGWLTVAWVEGETK

SEQ ID NO: 4814 - protein, 451 aa, Homo sapiens
MNKAPQSTGPPPAPSPGLPQPAFPPGQTAPVVFSTPQATQMNTPSQPRQHFYPSRAQPPSSAASRVQSAAPARPGPAALPPVSPLKAALSEEELEKKSKAIIEEYLHLNDMKEAVQCVQELASPSLLFIFVRHGVESTLERSAIAREHMGQLLHQLLCAGHLSTAQYYQGLYEILELAEDMEIDIPHVWLYLAELVTPILQEGGVPMGELFREITKPLRPLGKAASLLLEILGLLCKSMGPKKVGTLWREAGLSWKEFLPEGQDIGAFVAEQKVEYTLGEESEAPGQRALPSEELNRQLEKLLKEGSSNQRVFDWIEANLSEQQIVSNTLVRALMTAVCYSAIIFETPLRVDVAVLKARAKLLQKYLCDEQKELQALYALQALVVTLEQPPNLLRMFFDALYDEDVVKEDAFYSWESSKDPAEQQGKGVALKSVTAFFKWLREAEEESDHN

SEQ ID NO: 4815 - protein, 694 aa, Homo sapiens [sequence omitted]

SEQ ID NO: 4816 - protein, 649 aa, Homo sapiens
MPKAEANLGGLSSLVVNTPITSVSLSHSSSESSKMSESKDQENNCERPKESNVLHPNGECPVKSEPTEPGDEDEEDAYSNELDDEEVLGELTDSIGNKDFPLLNQSISPLSSSVLKFIEKGTSSSSATVSDDTEKKKQTAAVRASGSVASNYGISGKDFADASASKDSATAAHPSEIARGDEDSSATPHQHGFTPSTPGTPGPGGDGSPGSGIECPKCDTVLGSSRSLGGHMTMMHSRNSCKTLKCPKCNWHYKYQQTLEAHMKEKHPEPGGSCVYCKTGQPHPRLARGESYTCGYKPFRCEVCNYSTTTKGNLSIHMQSDKHLNNVQNLQNGNGEQVFGHSAPAPNTSLSGCGTPSPSKPKQKPTWRCEVCDYETNVARNLRIHMTSEKHMHNMMLLQQNMKQIQHNLHLGLAPAEAELYQYYLAQNIGLTGMKLENPADPQLMINPFQLDPATAAALAPGLGELSPYISDPALKLFQCAVCNKFTSDSLEALSVHVSSERSLPEEEWRAVIGDIYQCKLCNYNTQLKANFQLHCETDKHMQKYQLVAHIKEGGKSNEWRLKCIAIGNPVHLKCNACDYYTNSVDKLRLHTTNHRHEAALKLYKVSSDIHFRWHRVEKGINSFRAWSTSLQLKEKKREKTSKGRGHSF

SEQ ID NO: 4817 - protein, 808 aa, Homo sapiens
MLEGHESYDTENFYFREIRKNLQEVDFQWKDGEINYKEGPMTHKNNLTGQRVRHSQGDVENKHMENQLILRFQSGLGELQKFQTAEKIYGCNQIERTVNNCFLASPLQRIFPGVQTNISRKYGNDFLQLSLPTQDEKTHIREKPYIGNECGKAFRVSSSLINHQMIHTTEKPYRCNESGKAFHRGSLLTVHQIVHTRGKPYQCDVCGRIFRQNSDLVNHRRSHTGDKPYICNECGKSFSKSSHLAVHQRIHTGEKPYKCNRCGKCFSQSSSLATHQTVHTGDKPYKCNECGKTFKRNSSLTAHHIIHAGKKPYTCDVCGKVFYQNSQLVRHQIIHTGETPYKCNECGKVFFQRSRLAGHRRIHTGEKPYKCNECGKVFSQHSHLAVHQRVHTGEKPYKCNECGKAFNWGSLLTVHQRIHTGEKPYKCNVCGKVFNYGGYLSVHMRCHTGEKPLHCNKCGMVFTYYSCLARHQRMHTGEKPYKCNVCGKVFIDSGNLSIHRRSHTGEKPFQCNECGKVFSYYSCLARHRKIHTGEKPYKCNDCGKAYTQRSSLTKHLVIHTGENPYHCNEFGEAFIQSSKLARYHRNPTGEKPHKCSECGRTFSHKTSLVYHQRRHTGEMPYKCIECGKVFNSTTTLARHRRIHTGEKPYKCNECGKVFRYRSGLARHWSIHTGEKPYKCNECGKAFRVRSILLNHQMMHTGEKPYKCNECGKAFIERSNLVYHQRNHTGEKPYKCMECGKAFGRRSCLTKHQRIHSSEKPYKCNECGKSYISRSGLTKHQIKHAGENLTTKLNVERPLDVVLTSGIPK

SEQ ID NO: 4818 - protein, 602 aa, Homo sapiens [sequence omitted]

SEQ ID NO: 4819 - protein, 498 aa, Homo sapiens [sequence omitted]

SEQ ID NO: 4820 - protein, 486 aa, Homo sapiens
MRGRGSQQQQPTRRQGQKLPSPSPAGKYESAQPGGTQPEPGLGARMAIHKALVMCLGLPLFLFPGAWAQGHVPPGCSQGLNPLYYNLCDRSGAWGIVLEAVAGAGIVTTFVLTIILVASLPFVQDTKKRSLLGTQVFFLLGTLGLFCLVFACVVKPDFSTCASRRFLFGVLFAICFSCLAAHVFALNFLARKNHGPRGWVIFTVALLLTLVEVIINTEWLIITLVRGSGEGGPQGNSSAGWAVASPCAIANMDFVMALIYVMLLLLGAFLGAWPALCGRYKRWRKHGVFVLLTTATSVAIWVVWIVMYTYGNKQHNSPTWDDPTLAIALAANAWAFVLFYVIPEVSQVTKSSPEQSYQGDMYPTRGVGYETILKEQKGQSMFVENKAFSMDEPVAAKRPVSPYSGYNGQLLTSVYQPTEMALMHKVPSEGAYDIILPRATANSQVMGSANSTLRAEDMYSAQSHQAATPPKDGKNSQVFRNPYVWD

SEQ ID NO: 4821 - protein, 301 aa, Homo sapiens
MYTRRYSSISSTIMDVDSTISSGRSTPAMMNGQGSTTSSSKNIAYNCCWDQCQACFNSSPDLADHIRSIHVDGQRGGVFVCLWKGCKVYNTPSTSQSWLQRHMLTHSGDKPFKCVVGGCNASFASQGGLARHVPTHFSQQNSSKVSSQPKAKEESPSKAGMNKRRKLKNKRRRSLPRPHDFFDAQTLDAIRHRAICFNLSAHIESLGKGHSVVFHSTVIAKRKEDSGKIKLLLHWMPEDILPDVWVNESERHQLKTKVVHLSKLPKDTALLLDPNIYRTMPQKRLKRTLIRKVFNLYLSKQ

SEQ ID NO: 4822 - protein, 626 aa, Homo sapiens
MAVSGFTLGTCILLLHISYVANYPNGKVTQSCHGMIPEHGHSPQSVPVHDIYVSQMTFRPGDQIEVTLSGHPFKGFLLEARNAEDLNGPPIGSFTLIDSEVSQLLTCEDIQGSAVSHRSASKKTEIKVYWNAPSSAPNHTQFLVTVVEKYKIYWVKIPGPIISQPNAFPFTTPKATVVLLPTLPPVSHLTKPFSASDCGNKKFCIRSPLNCDPEKEASCVFLSFTRDDQSVMVEMSGPSKGYLSFALSHDQWMGDDDAYLCIHEDQTVYIQPSHLTGRSHPVMDSRDTLEDMAWRLADGVMQCSFRRNITLPGVKNRFDLNTSYYIFLADGAANDGRIYKHSQQPLITYEKYDVTDSPKNIGGSHSVLLLKVHGALMFVAWMTTVSIGVLVARFFKPVWSKAFLLGEAAWFQVHRMLMFTTTVLTCIAFVMPFIYRGGWSRHAGYHPYLGCIVMTLAVLQPLLAVFRPPLHDPRRQMFNWTHWSMGTAARIIAVAAMFLGMDLPGLNLPDSWKTYAMTGFVAWHVGTEVVLELKYWMMTEFRSFSHLLQWKQRVMLLKRQCWQFMSVGMLLFSSYFYLQSTIYEQAKTLAFAGQVIIIIKPKKLEACPDCLEHICEFSLGRLGSCL

SEQ ID NO: 4823 - protein, 827 aa, Homo sapiens [sequence omitted]

SEQ ID NO: 4824 - protein, 994 aa, Homo sapiens [sequence omitted]

SEQ ID NO: 4825 - protein, 105 aa, Homo sapiens
MEQSWTENDFDELREEGFRRSNYELQEEIQIKGKEVKNFEKNLDECITRITNTEKCLEDLMELKAKARELCEECRSLRSRCDQLEERVSVMEDEMNEMKQEGKFR

SEQ ID NO: 4826 - protein, 136 aa, Homo sapiens [sequence omitted]

SEQ ID NO: 4827 - protein, 250 aa, Homo sapiens
MAEGGASKGGGEEPGKLPEPAEEESQVLRGTGHCKWFNVRMGFGFISMINREGSPLDIPVDVFVHQSKLFMEGFRSLKEGEPVEFTFKKSSKGLESIRVTGPGGSPCLGSERRPKGKTLQKRKPKGDRCYNCGGLDHHAKECSLPPQPKKCHYCQSIMHMVANCPHKNVAQPPASSQGRQEAESQPCTSTLPREVGGGHGCTSPPFPQEARAEISERSGRSPQEASSTKSSIAPEEQSKKGPSVQKRKKT

SEQ ID NO: 4828 - protein, 748 aa, Homo sapiens
MKQMHEWNFTASSIKGISLSKFDERCCFLYVHDNSDDFQIYFSTEEQCSRFFSLVKEMITNTAGSTVELEGETDGDTLEYEYDHDANGERVVLGKGTYGIVYAGRDLSNQVRIAIKEIPERDSRYSQPLHEEIALHKYLKHRNIVQYLGSVSENGYIKIFMEQVPGGSLSALLRSKWGPMKEPTIKFYTKQILEGLKYLHENQIVHRDIKGDNVLVNTYSGVVKISDFGTSKRLAGVNPCTETFTGTLQYMAPEIIDQGPRGYGAPADIWSLGCTIIEMATSKPPFHELGEPQAAMFKVGMFKIHPEIPEALSAEARAFILSCFEPDPHKRATTAELLREGFLRQVNKGKKNRIAFKPSEGPRGVVLALPTQGEPMATSSSEHGSVSPDSDAQPDALFERTRAPRHHLGHLLSVPDESSALEDRGLASSPEDRDQGLFLLRKDSERRAILYKILWEEQNQVASNLQECVAQSSEELHLSVGHIKQIIGILRDFIRSPEHRVMATTISKLKVDLDFDSSSISQIHLVLFGFQDAVNKILRNHLIRPHWMFAMDNIIRRAVQAAVTILIPELRAHFEPTCETEGVDKDMDEAEEGYPPATGPGQEAQPHQQHLSLQLGELRQETNRLLEHLVEKEREYQNLLRQTLEQKTQELYHLQLKLKSNCITENPAGPYGQRTDKELIDWLRLQGADAKTIEKIVEEGYTLSDILNEITKEDLRYLRLRGGLLCRLWSAVSQYRRAQEASETKDKA

SEQ ID NO: 4829 - protein, 572 aa, Homo sapiens
MCHFKLVAIVGYLIRLSIKSIQIEADNCVTDSLTIYDSLLPIRSSILYRICEPTRTLMSFVSTNNLMLVTFKSPHIRRLSGIRAYFEVIPEQKCENTVLVKDITGFEGKISSPYYPSYYPPKCKCTWKFQTSLSTLGIALKFYNYSITKKSMKGCEHGWWEINEHMYCGSYMDHQTIFRVPSPLVHIQLQCSSRLSDKPLLAEYGSYNISQPCPVGSFRCSSGLCVPQAQRCDGVNDCFDESDELFCVSPQPACNTSSFRQHGPLICDGFRDCENGRDEQNCTQSIPCNNRTFKCGNDICFRKQNAKCDGTVDCPDGSDEEGCTCSRSSSALHRIIGGTDTLEGGWPWQVSLHFVGSAYCGASVISREWLLSAAHCFHGNRLSDPTPWTAHLGMYVQGNAKFVSPVRRIVVHEYYNSQTFDYDIALLQLSIAWPETLKQLIQPICIPPTGQRVRSGEKCWVTGWGRRHEADNKGSLVLQQAEVELIDQTLCVSTYGIITSRMLCAGIMSGKRDACKGDSGGPLSCRRKSDGKWILTGIVSWGHGCGRPNFPGVYTRVSNFVPWIHKYVPSLL

SEQ ID NO: 4830 - protein, 134 aa, Homo sapiens [sequence omitted]

SEQ ID NO: 4831 - protein, 184 aa, Homo sapiens [sequence omitted]

SEQ ID NO: 4832 - protein, 493 aa, Homo sapiens [sequence omitted]

SEQ ID NO: 4833 - protein, 803 aa, Homo sapiens [sequence omitted]

SEQ ID NO: 4834 - protein, 892 aa, Homo sapiens [sequence omitted]

SEQ ID NO: 4835 - protein, 891 aa, Homo sapiens
MALTQGPLTFRDVAIEFSQEEWKSLDPVQKALYWDVMLENYRNLVFLGILPKCMTKELPPIGNSNTGEKCQTVTLERHECYDVENFYLREIQKNLQDLEFQWKDGEINYKEVPMTYKNNLNGKRGQHSQEDVENKCIENQLTLSFQSRLTELQKFQTEGKIYECNQSEKTVNNSSLVSPLQRILPSVQTNISKKYENEFLQLSLPTQLEKTHIREKPYICKGCGKAFRVSSSLINHQMVHTTEKPYKCNECGKAFHRGSLLTIHQIVHTRGKPYQCGVCGKIFRQNSDLVNHRRSHTGEKPYKCNECGKSFSQSYNLAIHQRIHTGEKPYKCNECGKTFKQGSCLTTHQIIHTGEKPYQCDICGKVFRQNSNLVNHQRIHTGEKPYKCNICGKSFSQSSNLATHQTVHSGNKPYKCDECGKTFKRSSSLTTHQVIHTGEKPYTCDVCDKVFSQRSQLARHQRGHTGEKPYKCNECGKVFSQTSHLVGHRRIHTGEKPYKCDKCGKAFKQGSLLTRHKIIHTREKRYQCGECGKVFSENSCLVRHLRIHTGEQPYKCNVCGKVFNYSGNLSIHKRIRTGEKPFQCNECGTVFRNYSCLARHLRIHTGQKPYKCNVCGKVFNDSGNLSNHKRIHTGEKPFQCNECGKVFSYYSCLARHRKIHAGEKPYKCNDCGKAYTQRSSLTKHLIIHTGEKPYNCNEFGGAFIQSSKLARYHRNPTGEKPHKCSHCGRTFSHITGLTYHQRRHTGEMPYKCIECGQVFNSTSNLARHRRIHTGEKPYKCNECGKVFRHQSTLARHRSIHTGEKPYVCSECGKAFRVRSILVNHQKMHTGDKPYKCNECGKAFIERSKLVYHQRNHTGEKPYKCIECGKAFGRFSCLNKHQMIHSGEKPYK

SEQ ID NO: 4836 - protein, 374 aa, Homo sapiens
MIEYQIPVSFKDVVVGFTQEEWHRLSPAQRALYRDVMLETYSNLASVGYEGTKPDVILRLEQEEAPWIGEAACPGCHCWEDIWRVNIQRKRRQDMLLRPGAAISKKTLPKEKSCEYNKFGKISLLSTDLFSSIQSPSNWNPCGKNLNHNLDLIGFKRNCAKKQDECYAYGKLLQRINHGRRPNGEKPRGCSHCEKAFTQNPALMYKPAVSDSLLYKRKRVPPTEKPHVCSECGKAFCYKSEFIRHQRSHTGEKPYGCTDCGKAFSHKSTLIKHQRIHTGVRPFECFFCGKAFTQKSHRTEHQRTHTGERPFVCSECGKSFGEKSYLNVHRKMHTGERPYRCRECGKSFSQKSCLNKHWRTHFGESSLRSKSSNT

SEQ ID NO: 4837 - protein, 896 aa, Homo sapiens
MTEESEETVLYIEHRYVCSECNQLYGSLEEVLMHQNSHVPQQHFELVGVADPGVTVATDTASGTGLYQTLVQESQYQCLECGQLLMSPSQLLEHQELHLKMMAPQEAVPAEPSPKAPPLSSSTIHYECVDCKALFASQELWLNHRQTHLRATPTKAPAPVVLGSPVVLGPPVGQARVAVEHSYRKAEEGGEGATVPSAAATTTEVVTEVELLLYKCSECSQLFQLPADFLEHQATHFPAPVPESQEPALQQEVQASSPAEVPVSQPDPLPASDHSYELRNGEAIGRDRRGRRARRNNSGEAGGAATQELFCSACDQLFLSPHQLQQHLRSHREGVFKCPLCSRVFPSPSSLDQHLGDHSSESHFLCVDCGLAFGTEALLLAHRRAHTPNPLHSCPCGKTFVNLTKFLYHRRTHGVGGVPLPTTPVPPEEPVIGFPEPAPAETGEPEAPEPPVSEETSAGPAAPGTYRCLLCSREFGKALQLTRHQRFVHRLERRHKCSICGKMFKKKSHVRNRLRTHTGERPFPCPDCSKPFNSPANLARHRLTHTGERPYRCGDCGKAFTQSSTLRQHRLVHAQHFPYRCQECGVRFHRPYRLLMHRYHHTGEYPYKCRECPRSFLLRRLLEVHQLVVHAGRQPHRCPSCGAAFPSSLRLREHRCAAAAAQAPRRFECGTCGKKVGSAARLQAHEAAHAAAGPGEVLAKEPPAPRAPRATRAPVASPAALGSTATASPAAPARRRGLECSECKKLFSTETSLQVHRRIHTGERPYPCPDCGKAFRQSTHLKDHRRLHTGERPFACEVCGKAFAISMRLAEHRRIHTGERPYSCPDCGKSYRSFSNLWKHRKTHQQQHQAAVRQQLAEAEAAVGLAVMETAVEALPLVEAIEIYPLAEAEGVQISG

SEQ ID NO: 4838 - protein, 464 aa, Homo sapiens
MFENESRKIFSEMPEGESAQHSDGESDFERDAGIQRLQGHTPGEDHGEVVSQDREVGQLIGLQGTYLGEKPYECPQCGKTFSPKSHLITHERTHTGEKYYKCDECGKSFSDGSNFSRHQTTHTGEKPYKCRDCGKSFSRSANLITHQRIHTGEKPFQCAECGKSFSRSPNLIAHQRTHTGEKPYSCPECGKSFGNRSSLNTHQGIHTGEKPYECKECGESFSYNSNLIRHQRIHTGEEPYKCTDCGQRFSQSSALITHRRTHTGEKPYQCSECGKSFSRSSNLATHRRTHMVEKPYKCGVCGKSFSQSSSLIAHQGMHTGEKPYECLTCGESFSWSSNLLKHQRIHTGEKPYKCSECGKCFSQRSQLVVHQRTHTGEKPYKCLMCGKSFSRGSILVMHQRAHLGDKPYRCPECGKGFSWNSVLIIHQRIHTGEKPYKCPECGKGFSNSSNFITHQRTHMKEKLY

SEQ ID NO: 4839 - protein, 347 aa, Homo sapiens
MSGPGNKRAAGDGGSGPPEKKLSREEKTTTTLIEPIRLGGISSTEEMDLKVLQFKNKKLAERLEQRQACEDELRERIEKLEKRQATDDATLLIVNRYWAQLDETVEALLRCHESRIRELEERDRRESKKIADEDALRRIRQAEEQIEHLQRKLGATKQEEEALLSEMDAQLLTVQKLEEKERALQGSLGGVEKELTLRSQALELNKRKAVEAAQLAEDLKVQLEHVQTRLREIQPCLAESRAAREKESFNLKRAQEDISRLRRKLEKQRKVEVYADADEILQEEIKEYKARLTCPCCNTRKKDAVLTKCFHVFCFECVRGRYEARQRKCPKCNAAFGAHDFHRIYIS

SEQ ID NO: 4840 - protein, 997 aa, Homo sapiens
MEASWRQVAGGRGRSRGRATAAPSGNGVHLRGAGGGREKGSVGAVPSGTSPGGVATTAAAGSRHSPAGSQALQTTAASELMSQKKFEEIKKANQAAARKLVEEQFSSSSEEGDEDFEGKQGKILANTFITYTTQTDGDTRELERTKQYVNEAFQAGAMTCLICIASVKRNQAVWSCSGCFCIFHMPCIQKWAKDSQFLVSSVTDDDFGKKDCPWPCPKCRFEYKRSETPSRYYCYCGKVEDPPLDPWLVPHSCGQVCEREFKPPCGHKCLLLCHPGPCPPCPKMVTTTCYCKKAKPIPRRCSAKEWSCQLPCGQKLLCGQHKCENPCHAGSCQPCPRVSRQKCVCGKKVAERSCASPLWHCDQVCGKTLPCGNHTCEQVCHVGACGECPRSGKRFCPCQKSKFSLPCTEDVPTCGDSCDKVLECGIHRCSQRCHRGPCETCRQEVEKHCRCGKHTKRMPCHKPYLCETKCVKMRDCQKHQCRRKCCPGNCPPCDQNCGRTLGCRNHKCPSVCHRGSCYPCPETVDVKCNCGNTKVTVPCGRERTTRPPKCKEQCSRPPTCHHTSQEKHRCHFGSCPPCHQPCQKVLEKCGHLCPAPCHDQALIKQTGRHQPTGPWEQPSEPAFIQTALPCPPCQVPIPMECLGKHEVSPLPCHAVGPYSCKRVCGRILDCQNHTCMKECHKVTKTDGCTGKNKAGPECLHCEEGCSKSRPLGCLHPCILRCHPGECPPCVQMLRIKCHCKITSLYVECRKITTADVNEKNLLSCCKNQCPKELPCGHRCKEMCHPGECPFNCNQKVKLRCPCKRIKKELQCNKVRENQVSIECDTTCKEMKRKASEIKEAEAKAALEEEKRRQQAELEAFENRLKTNHIGHTGYLNTVTVSPDGSLCASGGKDGQAMLWDLNEGKHLYTLDGGDIINALCFSPNRYWLCAATGPSIKIWDLEGKIIVDELKQEVISTSSKAEPPQCTSLAWSADGQTLFAGYTDNLVRVWQVTIGTR

SEQ ID NO: 4841 - protein, 709 aa, Homo sapiens
MKRCRSDELQQQQGEEDGAGLEDAASHLPGADLRPGETTGANSAGGPTSDAGAAAAPNPGPRSKPPDLKKIQQLSEGSMFGHGLKHLFHSRRRSREREHQTSQDSQQHQQQQGMSDHDSPDEKERSPEMHRVSYAMSLHDLPARPTAFNRVLQQIRSRPSIKRGASLHSSSGGGSSGSSSRRTKSSSLEPQRGSPHLLRKAPQDSSLAAILHQHQCRPRSSSTTDTALLLADGSNVYLLAEEAEGIGDKVDKGDLVALSLPAGHGDTDGPISLDVPDGAPDPQRTKAAIDHLHQKILKITEQIKIEQEARDDNVAEYLKLANNADKQQVSRIKQVFEKKNQKSAQTIAQLHKKLEHYRRRLKEIEQNGPSRQPKDVLRDMQQGLKDVGANVRAGISGFGGGVVEGVKGSLSGLSQATHTAVVSKPREFASLIRNKFGSADNIAHLKDPLEDGPPEEAARALSGSATLVSSPKYGSDDECSSASASSAGAGSNSGAGPGGALGSPKSNALYGAPGNLDALLEELREIKEGQSHLEDSMEDLKTQLQRDYTYMTQCLQEERYRYERLEEQLNDLTELHQNEMTNLKQELASMEEKVAYQSYERARDIQEAVESCLTRVTKLELQQQQQQVVQLEGVENANARALLGKFINVILALMAVLLVFVSTIANFITPLMKTRLRITSTTLLVLVLFLLWKHWDSLTYLLEHVLLPS

SEQ ID NO: 4842 - protein, 335 aa, Homo sapiens
MQRHVMVANPSVLCSHFNQDLWPEQSIKDSFQKLILRRHKKCGHDNLQLKKGCESVDKCKVHKRGYNGLNQCLTTTQSKMFQCDKHGKVFHQFSNTNRHKIRHTGKNPCKFTECGKAFNRSSTFTTHKKIHTGEKPYKCIECGKAFNRSSHLTTHKIIHTGEKRYKCEDCGKAFNRSSNLTTHKKIHTGEKPYKCEECGKAFKRSSILTTHKRIHTGEKPYKCEECGKVFKYLSSLSTHKIIHTGEKPYKCEECGKAFNWSSHLTTHKRIHTGEKPYKCEECGKGFKYSSTLTKHKIIHTGEKPYKCEECRSLRSQCDQLEERVSVMEDEMNGMK

SEQ ID NO: 4843 - protein, 505 aa, Homo sapiens
MKAQRERLQIPGLTLDLTPRSLSPTPSSPGSPCSPLLAFHFWSCRTSNRKSLIGNGQSPALPRPHSPLSAHAGNSPQDSPRNFSPSASAHFSFARRNDRTDGRRWSLASLPSSGYGTNTPSSTVSSSCSSQEKLHQLPYQPTPDELHFLSKHFCTTESIATENRCRNTPMHPRSRSLSPGRSPACCDHEIIMMNHVYKERFPKATAQMEERLKEIITSYSPDNVLPLADGVLSFTHHQIIELARDCLDKSHQGLITSRYFLELQHKLDKLLQEAHDRSESGELAFIKQLVRKILIVIARPARLLECLEFDPEEFYYLLEAAEGHAKEGQGIKTDIPRYIISQLGLNKDPLEEMAHLGNYDSGTAETPETDESVSSSNASLKLRRKPRESDFETIKLISNGAYGAVYFVRHKESRQRFAMKKINKQNLILRNQIQQAFVERDILTFAENPFVVSMYCSFETRRHLCMVMEYVEGGDCATLMKNTGPLPVDMARMYFAETVLALEFT

SEQ ID NO: 4844 - protein, 408 aa, Homo sapiens
MREKSFQCNESGKAFNYSSLLRKHQIIHLGEKQYKCDVCGKVFNRKRNLVCHRRCHTGEKPYRCNECGKTFSQTYSLTCHRRLHTGEKPYKCEECDKAFSFKSNLKRHRRIHAGEKPYKCNECGKTFSQTSSLTCHRRLHTGEKPFKCNECGKTFSRKSSLTCHHRLHTGEKPYKCNECGKTFSQELTLKCHRRLHTGEKPYKCNECGKVFNKKANLARHHRLHSGEKPYKCTECVKTFSRNSALVIHKAIHIGEKRYKCNECGKTFSRISALVIHTAIHTGEKPYKCNECGKGFNRKTHLACHHRLHTGEKPYKCNECGKVFNRKTHLAHHHRLHTGDKPYKCNECGKVFNQKAHLARHHRLHTGEKPYKCNECGKVFNQKANLARHHRLHTGEKPYKFNECGKAFN

SEQ ID NO: 4845 - protein, 596 aa, Homo sapiens
MLPSQAQGLLWWVFPLFPASSLSYPPVSYRADGLARNTFLKACSESSSSSNISTMLVTHDYTAVKEDEINVYQGEVVQILASNQQNMFLVFRAATDQCPAAEGWIPGFVLGHTSAVIVENPDGTLKKSTSWHTALRLRKKSEKKDKDGKREGKLENGYRKSREGLSNKVSVKLLNPNYIYDVPPEFVIPLSEVTCETGETVVLRCRVCGRPKASITWKGPEHNTLNNDGHYSISYSDLGEATLKIVGVTTEDDGIYTCIAVNDMGSASSSASLRVLGPGMDGIMVTWKDNFDSFYSEVAELGRGRFSVVKKCDQKGTKRAVATKFVNKKLMKRDQVTHELGILQSLQHPLLVGLLDTFETPTSYILVLEMADQGRLLDCVVRWGSLTEGKIRAHLGEVLEAVRYLHNCRIAHLDLKPENILVDESLAKPTIKLADFGDAVQLNTTYYIHQLLGNPEFAAPEIILGNPVSLTSDTWSVGVLTYVLLSGVSPFLDDSVEETCLNICRLDFSFPDDYFKGVSQKAKEFVCFLLQEDPAKRPSAALALQEQWLQAGNGRSTGVLDTSRLTSFIERRKHQNDVRPIRSIKNFLQSRLLPRV

SEQ ID NO: 4846 - protein, 569 aa, Homo sapiens
MPSSLFADLERNGSGGGGGGSSGGGETLDDQRALQLALDQLSLLGLDSDEGASLYDSEPRKKSVNMTECVPVPSSEHVAEIVGRQGCKIKALRAKTNTYIKTPVRGEEPVFVVTGRKEDVAMARREIISAAEHFSMIRASRNKNTALNGAVPGPPNLPGQTTIQVRVPYRVVGLVVGPKGATIKRIQQQTHTYIVTPSRDKEPVFEVTGMPENVDRAREEIEAHIALRTGGIIELTDENDFHANGTDVGFDLHHGSGGSGPGSLWSKPTPSITPTPGRKPFSSYRNDSSSSLGSASTDSYFGGGTSSSAAATQRLADYSPPSPALSFAHNGNNNNNGNGYTYTAGGEASVPSPDGCPELQPTFDPAPAPPPGAPLIWAQFERSPGGGPAAPVSSSCSSSASSSASSSSVVFPGGGASAPSNANLGLLVHRRLHPGTSCPRLSPPLHMAPGAGEHHLARRVRSDPGGGGLAYAAYANGLGAQLPGLQPSDTSGSSSSSSSSSSSSSSSSGLRRKGSRDCSVCFESEVIAALVPCGHNLFCMECANRICEKSEPECPVCHTAVTQAIRIFS

SEQ ID NO: 4847 - protein, 302 aa, Homo sapiens
MALLITPAGVATVNRHSTIPSDTHTSREKPRFHKPCRNDLESLLSEGRLDTSVQTPCPQHPHTQLSCEPQPLEHSSCLSTCLAGCFLPVPSSPHTHPLLPGSRWLPPPLALLMGTLSPGLAVKPSWVPRFPLLARQSPATSVGMPLSAATQPGSVGRLHFPKLRSSSPFSGHSDENKATGQGRENRDQPQRPSHLCECPEAAKQSATNGVAETNRSVFPLGSEARSLSLRRQESQPHSGSSRRESVSCSPSFWCCWQPLAFLTCGCAAPISVPGVTRPSPRPCCVSPPLVRLQSLGLGPTQI

SEQ ID NO: 4848 - protein, 449 aa, Homo sapiens
MPGMMEKGPELLGKNRSANGSAKSPAGGGGSGASSTNGGLHYSEPESGCSSDDEHDVGMRVGAEYQARIPEFDPGATKYTDKDNGGMLVWSPYHSIPDAKLDEYIAIAKEKHGYNVEQALGMLFWHKHNIEKSLADLPNFTPFPDEWTVEDKVLFEQAFSFHGKSFHRIQQMLPDKTIASLVKYYYSWKKTRSRTSLMDRQARKLANRHNQGDSDDDVEETHPMDGNDSDYDPKKEAKKEGNTEQPVQTSKIGLGRREYQSLQHRHHSQRSKCRPPKGMYLTQEDVVAVSCSPNAANTILRQLDMELISLKRQVQNAKQVNSALKQKMEGGIEEFKPPESNQKINARWTTEEQLLAVQGVRKYGKDFQAIADVIGNKTVGQVKNFFVNYRRRFNLEEVLQEWEAEQGTQASNGDASTLGEETKSASNVPSGKSTDEEEEVCLCMEFELI

SEQ ID NO: 4849 - protein, 244 aa, Homo sapiens
MTGSNSHITILTVNINGLNAPIKGHRLANWIKSQDPSVCCIQETHLMRKFTHRFNIKGWRKIYQENGKQKKAGVAILVSDKTDFKPTKIKGDKGHYIMVKGSMQQEELTILNIYAPNTRAPRFIKQVLRDLQRDLDSHTIIMGDFNTELSILERSTRQKVNKDIQDLNSALQQTDPIDIHRNLHLKSTEYTLFSAPHITYSKFDHIIGSKALLTKCKRTEITTNCLLDHSAIKFELRIKKLTQN

SEQ ID NO: 4850 - protein, 695 aa, Homo sapiens
MVYPYPGARAEEKLGGTRDPTYQERAAPQTQPLGKETDSLSAGFVVVMGVDLSRCGPDHTASRCPWDPGLLLRFLAAMAAVGALEPLLPGPLLAVHPHAGTAPPANQLPWPVLCSPVAGVILLALGALLVLQLIRRRRREHGALWLPPGFTRRPRTQSAPHRRRPPLGEDSIGLKALKPKAEVDEDGVVMCSGPEEGEEAEETGPPSTCQLWSLSGGCGALPQAAMLTPPQESEMEAPDLDTRGPDGVTPLMSAVCCGEVQSGTFQGAWLGCPEPWEPLLDGGACPQAHTVGTGETPLHLAARFSRPTAARRLLEAGANPNQPDRAGRTPLHAAVAADAREVCQLLLRSRQTAVDARTEDGTTPLMLAARLAVEDLVEELIAAQADVGARDKWGKTALHWAAAVNNARAARSLLQAGADKDAQDNREQTPLFLAAREGAVEVAQLLLGLGAARELRDQAGLAPADVAHQRNHWDLLTLLEGAGPPEARHKATPGREAGPFPRARTVSVSVPPHGGGALPRCRTLSAGAGPRGGGACLQARTWSVDLAARGGGAYSHCRSLSGVGAGGGPTPRGRRFSAGMRGPRPNPAIMRGRYGVAAGRGGRVSTDDWPCDWVALGACGSASNIPIPPPCLTPSPERGSPQLDCGPPALQEMPINQGGEGKKIEEYMVGRNSKNDYPLKGRLEGLPGFKMDPPK

SEQ ID NO: 4851 - protein, 211 aa, Homo sapiens [sequence omitted]

SEQ ID NO: 4852 - protein, 193 aa, Homo sapiens
MHALKMTWHVHCFTCAACKTPIRNRAFYMEEGVPYCERGTHWPVRVRRDGAWGRHESRSSFSLPPFSDYEKMFGTKCHGCDFKIDAGDRFLEALGFSWHDTCFVCAVRAPPLELSPKPTGPLFIPQEMQEKLGRGLSCCPQPHVTGPLLSLDMSDQPGRKDLLLQEGQASLQEPCLLSCVSPFCPQLPRWPLA

SEQ ID NO: 4853 - protein, 134 aa, Homo sapiens [sequence omitted]

SEQ ID NO: 4854 - protein, 568 aa, Homo sapiens
MGSEVVAGNSVGPTMGAASSGPLPPPPPPLPPSSDTPETVQNGPVTPPMPPPPPLPGPAAETVPAPPLAPPLPSAPPLPGTSSPTVVFNSGLAAVKIKKPIKTKFRMPVFNWVALKPNQINGTVFNEIDDERILEDLNVDEFEEIFKTKAQGPAIDLSSSKQKIPQKGSNKVTLLEANRAKNLAITLRKAGKTADEICKAIHVFDLKTLPVDFVECLMRFLPTENEVKVLRLYERERKPLENLSDEDRFMMQFSKIERLMQKMTIMAFIGNFAESIQMLTPQLHAIIAASVSIKSSQKLKKILEIILALGNYMNSSKRGAVYGFKLQSLDLLLDTKSTDRKQTLLHYISNVVKEKYHQVSLFYNELHYVEKAAAVSLENVLLDVKELQRGMDLTKREYTMHDHNTLLKEFILNNEGKLKKLQDDAKIAQDAFDDVVKYFGENPKTTPPSVFFPVFVRFVKAYKQAEEENELRKKQEQALMEKLLEQEALMEQQDPKSPSHKSKRQQQELIAELRRRQVKDNRHVYEGKDGAIEDIITALKKNNITKFPNVHSRVRISSSTPVVEDTQS

SEQ ID NO: 4855 - protein, 415 aa, Homo sapiens
MTLAASSQRSQIIRSKFRSVLQLRIHRRNQEQISDPDPWISASDPPLAPALPSGTAPFLFSPGVLLPEPEYCPPWRSPKKESPKISQRWRESKPRGNLTYHQYMPPEPRQGSRADPQAEGSALGPPGPSLWEGTDSQQPHPRMKPSPLTPCPPGVPSPSPPPHKLELQTLKLEELTVSELRQQLRLRGLPVSGTKSMLLERMRGGAPPRERPKPRREDSPAGAPWPRLKPKALAAARRQGSVKPSAASHRPPLPRAADTPGTAPAPTPTPAPAAAPALTPSSGPGSAALTLEEELQEAIRRAQLLPNRGIDDILEDQVEPDDPLPPIPLDFPGSFDVLSPSPDSEGLSSVFSSSLPSPTNSSSPSPRDPTDSLDWLEALSGGPPLGSGPPPPSIFSADLSDSSSSRLWDLLEDPW

SEQ ID NO: 4856 - protein, 197 aa, Homo sapiens
MSCYPTFDWATWAEGEKGVWKSPPSIQTGDQIGVREELLNALHSSLARPAIKKHQHPKGKKKRRSREKHQESTTDPGSPKKCRARFGLNQQTDWCGPCRRKKKCIRYLPGEGRCPSPVPSDDSALGCPGSPAPQDSPSYHLLPRFPTELLTSPAEPAPTSPGLSTALSLPTPGPPQAPRSTLQSTQVQQQESQRQVA

SEQ ID NO: 4857 - protein, 209 aa, Homo sapiens
MKKLTPKQKFSEDLESYKISVVMQESAEKLSEKLHKCKEFVDSCRLTFPTSGDEYSRGFLQNLNLIQDQNAQTRWKQGRYDEDGKPFNQRSLLLGHERILTRAKSYECSECGKVIRRKAWFDQHQRIHFLENPFECKVCGQAFRQRSALTVHKQCHLQNKPYRCHDCGKCFRQLAFLLNIRGFTPKKNLINVANVKKRLVRIQPLFDIR

SEQ ID NO: 4858 - protein, 259 aa, Homo sapiens
MECHLKTHYKMEYKCRICQTVKANQLELETRTREHRLGNHYKCDQCGYLSKTANKLIEHVRVHTGERPFHCDQCSYSCKRKDNLNLHKKLKHAPRQTFSCEECLFKTTHPFVFSRHVKKHQSGDCPEEDKKGLCPAPKEPAGPGAPLLVVGSSRNLLSPLSVMSASQALQTVALSAAHGSSSEPNLALKALAFNGSPLRFDKYRNSDFAHLIPLTMLYPKNHLDLTFHPPRPQTAPPSIPSPKHPFLAYLGLRERAETV

SEQ ID NO: 4859 - protein, 160 aa, Homo sapiens [sequence omitted]

SEQ ID NO: 4860 - protein, 276 aa, Homo sapiens
MNVQSSRSHAIFTIHLCQMRMCTQPDLVNEAVTGLPDGTPPSSEYETLTAKFHFVDLAGSERLKRTGATGERAKEGISINCGLVGTWWVISPSTHTAQSQTPPRPCSPTPAESSLDILPISPSLSGVTPVPSFPISPTYPCAYKPTQGARGLLGPKRQLALGNVISALGDQSKKVVHVSYRDSKLTRLLQDSLGGNSQTIMIACVSPSDRDFMETLNTLKYANRARNIKNKVVVNQDKTSQQISALRAEIARLQMELMEYKAVSMLLGIAQHSPWS

SEQ ID NO: 4861 - protein, 159 aa, Homo sapiens [sequence omitted]

SEQ ID NO: 4862 - protein, 781 aa, Homo sapiens
MKSSGPVERLLRALGRRDSSRAASRPRKAEPHSFREKVFRKKPPVCAVCKVTIDGTGVSCRVCKVATHRKCEAKVTSACQALPPVELRRNTAPVRRIEHLGSTKSLNHSKQRSTLPRSFSLDPLMERRWDLDLTYVTERILAAAFPARPDEQRHRGHLRELAHVLQSKHRDKYLLFNLSEKRHDLTRLNPKVQDFGWPELHAPPLDKLCSICKAMETWLSADPQHVVVLYCKGNKGKLGVIVSAYMHYSKISAGADQALATLTMRKFCEDKVATELQPSQRRYISYFSGLLSGSIRMNSSPLFLHYVLIPMLPAFEPGTGFQPFLKIYQSMQLVYTSGVYHIAGPGPQQLCISLEPALLLKGDVMVTCYHKGGRGTDRTLVFRVQFHTCTIHGPQLTFPKDQLDEAWTDERFPFQASVEFVFSSSPEKIKGSTPRNDPSVSVDYNTTEPAVRWDSYENFNQHHEDSVDGSLTHTRGPLDGSPYAQVQRPPRQTPPAPSPEPPPPPMLSVSSDSGHSSTLTTEPAAESPGRPPPTAAERQELDRLLGGCGVASGGRGAGRETAILDDEEQPTVGGGPHLGVYPGHRPGLSRHCSCRQGYREPCGVPNGGYYRPEGTLERRRLAYGGYEGSPQGYAEASMEKRRLCRSLSEGLYPYPPEMGKPATGDFGYRASSAALSCSPRPTPAVVHFKVSAQGITLTDNQRKLFFRRHYPVNSITFSSTDPQDRRWTNPDGTTSKIFGFVAKKPGSPWENVCHLFAELDPDQPAGAIVTFITKVLLGQRK

SEQ ID NO: 4863 - protein, 114 aa, Homo sapiens [sequence omitted]

SEQ ID NO: 4864 - protein, 141 aa, Homo sapiens
MPVIPALGEAKGEVLPPGDTTTIIPLNWMLKSPPGHFGLLLLLSQQAKNGVMVLAGVTDPEYQDEISLLLHNEGHLKEVKMEGARLGLPGRAESLEHQVQSHLNMIAQSQRTFQKKDAGKAIILSKLTQEQKTKHCMFSLH

SEQ ID NO: 4865 - protein, 731 aa, Homo sapiens
MHLRLRPEVGRSRARSGEPAGSAAAREVMAAAPARGGGGGGGGGGGCSGSGSSASRGFYFNTVLSLARSLAVQRPASLEKVRKLLCMCPVDFHGIFQLDERRRDAVIALGIFLIESDLQHKDCVVPYLLRLLKGLPKVYWVEESTARKGRGALPVAESFSFCLVTLLSDVAYRDPSLRDEILEVLLQVLHVLLGMCQALEIQDKEYLCKYAIPCLIGISRAFGRYSNMEESLLSKLFPKIPPHSLRVLEELEGVRRRSFNDFRSILPSNLLTVCQEGTLKRKTSSVSSISQVSPERGMPPPSSPGGSAFHYFEASCLPDGTALEPEYYFSTISSSFSVSPLFNGVTYKEFNIPLEMLRELLNLVKKIVEEAVLKSLDAIVASVMEANPSADLYYTSFSDPLYLTMFKMLRDTLYYMKDLPTSFVKEIHDFVLEQFNTSQGELQKILHDADRIHNELSPLKLRCQANAACVDLMVWAVKDEQGAENLCIKLSEKLQSKTSSKVIIAHLPLLICCLQGLGRLCERFPVVVHSVTPSLRDFLVIPSPVLVKLYKYHSQYHTVAGNDIKISVTNEHSESTLNVMSGKKSQPSMYEQLRDIAIDNICRCLKAGLTVDPVIVEAFLASLSNRLYISQESDKDAHLIPDHTIRALGHIAVALRDTPKVMEPILQILQQKFCQPPSPLDVLIIDQLGCLVITGNQYIYQEVWNLFQQISVKASSVVYSATKDYKDHGYR

SEQ ID NO: 4866 - protein, 288 aa, Homo sapiens [sequence omitted]

SEQ ID NO: 4867 - protein, 143 aa, Homo sapiens
MPSTPSSRRSRNSSRSPPQTADCWASSKARTPSSTELQPCLEGRPPSCHPDLSGSPFPPSLDPKSGAIHQECRPLVGGAGCCLPIGQLLPEMQMRLLETGWELAEPRWRRGSAPGHFTGREGEGKKSLRLWDTDSQNKHICGC

SEQ ID NO: 4868 - protein, 281 aa, Homo sapiens
MAVDSLLRILKTLRLDFIQELEVFYWCRDFLVLAEPNLSAIQLGRIFNLRSLKLFYYKWAFSSWVRRPSSYFFSQLTMLGHLRKLHLSHSYLVGKLHYILSCLWVPLHSLEICNCKLLDTDITYLSRSHHTTCLKKLDLSVNDLSYMIPGPLGTLLRAVSGTLQHLDLKHCWLKDAHLSALLPALCRCSHLSSLSLSDNPISSACLLSLLEHTMGLMELKQVLYPIPVDCCIYLHGVCRGPVNEDKLCQLQAEIQKQLQAMQQADMQWSPSTVFAYAAGAV

SEQ ID NO: 4869 - protein, 197 aa, Homo sapiens [sequence omitted]

SEQ ID NO: 4870 - protein, 218 aa, Homo sapiens [sequence omitted]

SEQ ID NO: 4871 - protein, 349 aa, Homo sapiens
MAMAFTDLLDALGSMGRFQLNHTALLLLPCGLLACHNFLQNFTAAVPPHHCRGPANHTEASTNDSGAWLRATIPLDQLGAPEPCRRFTKPQWALLSPNSSIPGAATEGCKDGWVYNRSVFPSTIVMEWDLVCEARTLRDLAQSVYMAGVLVGAAVFGSLADRLGCKGPLVWSYLQLAASGAATAYFSSFSAYCVFRFLMGMTFSGIILNSVSLVASRVIPLAPPAWQVPVSCTESAEGGCNEREEGGRGKADQGGDELLHPKRVCKCLHLQLNLGPLPNPGHPQGHMLSHGDLRGRQRSSGSGEQGGSCEPESRNGRLPAVAPAGLGLPFVHLPLSAREKQILSSKFQS

SEQ ID NO: 4872 - protein, 421 aa, Homo sapiens
MRYSLSPDNHLEDGIMNMANFLRGFEEKGIKNDRPEDQLSKEKKKILFSFCEVCNIQLNSAAQAQVHSNGKSHRKRVKQLSDGQPPPPAQASPSSNSSTGSTCHTTTLPALVRTPTLMMQPSLDIKPFMSFPVDSSSAVGLFPNFNTMDPVQKAVINHTFGVSIPPKKKQVISCNVCQLRFNSDSQAEAHYKGSKHAKKVKALDATKNKPKMVPSKDSAKANPSCSITPITGNNSDKSEDKGKLKASSSSQPSSSESGSFLLKSGTTPLPPGAATSPSKSTNGAPGTVVESEEEKAKKLLYCSLCKVAVNSLSQLEAHNTGSKHKTMVEARNGAGPIKSYPRPGSRLKMQNGSKGSGLQNKTFHCEICDVHVNSEIQLKQHISSRRHKDRVAGKPLKPKYTPCKVIGLLPKPLPPANRQLS

SEQ ID NO: 4873 - protein, 277 aa, Homo sapiens
MGKNLKGILTTENILSIDNSVNKKDLSICGSSGEEFFNNCEVLQCGFSVPRENIRTRHKICPCDKCEKVFPSISKLKRHYLIHTGQRPFGCNICGKSFRQSAHLKRHEQTHNEKSPYASLCQVEFGNFNNLSNHSGNNVNYNASQQCQAPGVQKYEVSESDQMSGVKAESQDFIPGSTGQPCLPNVLLESEQSNPFCSYSEHQEKNDVFLYRCSVCAKSFRSPSKLERHYLIHAGQKPFECSVCGKTFRQAPHWKRHQLTHFKERPQGKVVALDSVM

SEQ ID NO: 4874 - protein, 933 aa, Homo sapiens
MAWKTLPIYLLLLLSVFVIQQVSSQELSCKGRCFESFERGRECDCDAQCKKYDKCCPDYESFCAEVHNPTSPPSSKKAPPPSGASQTIKSTTKRSPKPPNKKKTKKVIESEEITEEHSVSENQESSSSSSSSSSSSTIRKIKSSKNSAANRELQKKLKVKDNKKNRTKKKPTPKPPVVDEAGSGLDNGDFKVTTPDTSTTQHNKVSTSPKITTAKPINPRPSLPPNSDTSKETSLTVNKETTVETKETTTTNKQTSTDGKEKTTSAKETQSIEKTSAKDLAPTSKVLAKPTPKAETTTKGPALTTPKEPTPTTPKEPASTTPKEPTPTTIKSAPTTPKEPAPTTTKSAPTTPKEPAPTTTKEPAPTTPKEPAPTTPETPPPTTSEVSTPTTTKEPTTIHKSPDESTPELSAEPTPKALENSPKEPGVPTTKTPAATKPEMTTTAKDKTTERDLRTTPETTTAAPKMTKETATTTEKTTESKITATTTQVTSTTTQDTTPFKITTLKTTTLAPKVTTTKKTITTTEIMNKPEETAKPKDRATNSKATTPKPQKPTKAPKKPTSTKKPKTMPRVRKPKTTPTPRKMTSTMPELNPTSRIAEAMLQTTTRPNQTPNSKLVEVNPKSEDAGGAEGETPHMLLRPHVFMPEVTPDMDYLPRVPNQGIIINPMLSDETNICNGKPVDGLTTLRNGTLVAFRGHYFWMLSPFSPPSPARRITEVWGIPSPIDTVFTRCNCEGKTFFFKDSQYWRFTNDIKDAGYPKPIFKGFGGLTGQIVAALSTAKYKNWPESVYFFKRGGSIQQYIYKQEPVQKCPGRRPALNYPVYGETTQVRRRRFERAIGPSQTHTIRIQYSPARLAYQDKGVLHNEVKVSILWRGLPNVVTSAISLPNIRKPDGYDYYAFSKDQYYNIDVPSRTARAITTRSGQTLSKVWYNCP

SEQ ID NO: 4875 - protein, 216 aa, Homo sapiens
MRWWHRCGQPGTDVVLTGKNLPRPTLSTPAESSQPGQGAHVGPNAHAPHSCGELTARPRGARGAQRPRSPLLRRAHSQARGRTWGPTPTLPTPAESSQPGQGAHVGPNAHAPHSCGELTARPGGARGAQRPHSPLLRRAHSQARGRTWGPTFRNKIIVYSFLFFLKSVFLLRTPDVCGSEAQWAYSYLTWQTWKWKLLCITRISRASASCWPDRVP

SEQ ID NO: 4876 - protein, 904 aa, Homo sapiens [sequence omitted]

SEQ ID NO: 4877 - protein, 164 aa, Homo sapiens
MSEPSPCPPEGVQLCGPALYRLVPCVCAVSVCLLPQVLKKYPRLWCMTKPPSRRPKLYIVNLQWTPKDDWAALKLHGKCDDVMRLLMAELGLEIPAYSRWQDPIFSLATPLRAGEEGSHSRKSLCRSREEAPPGDRGAPLSSAPILGGWFGRGCTKRTKRKKVT

SEQ ID NO: 4878 - protein, 477 aa, Homo sapiens
MKLIRSSSCHVGSARKLHHWRAGQTEPGWAGTRHDSPVPLPPRGGLAADNVLLSSDGSHAALCDFGHAVCLQPDGLGKSLLTGDYIPGTETHMAPEVVLGRSCDAKVDVWSSCCMMLHMLNGCHPWTQFFRGPLCLKIASEPPPVREIPPSCAPLTAQAIQEGLRKEPIHRVSAAELGGKVNRALQQVGGLKSPWRGEYKEPRHPPPNQANYHQTLHAQPRELSPRAPGPRPAEETTGRAPKLQPPLPPEPPEPNKSPPLTLSKEESGMWEPLPLSSLEPAPARNPSSPERKATVPEQELQQLEIELFLNSLSQPFSLEEQEQILSCLSIDSLSLSDDSEKNPSKASQSSRDTLSSGVHSWSSQAEARSSSWNMVLARGRPTDTPSYFNGVKVQIQSLNGEHLHIREFHRVKVGDIATGISSQIPAAAFSLVTKDGQPVRYDMEVPDSGIDLQCTLAPDGSFAWSWRVKHGQLENRP

SEQ ID NO: 4879 - protein, 486 aa, Homo sapiens
MGSEKDSESPRSTSLHAAAPDPKCRSGGRRRRLLSCPHRSCRDCLRHYLRLEISESRVPISCPECSERLNPHDIRLLLADPPLMHKYEEFMLRRYLASDPDCRWCPAPDCGYAVIAYGCASCPKLTCEREGCQTEFCYHCKQIWHPNQTCDMARQQRAQTLRVRTKHTSGLSYGQESGPDDIKPCPRCSAYIIKMNDGSCNHMTCAVCGCEFCWLCMKEISDLHYLSPSGCTFWGKKPWSRKKKILWQLGTLIGAPVGISLIAGIAIPAMVIGIPVYVGRKIHSRYEGRKTSKHKRNLAITGGVTLSVIASPVIAAVSVGIGVPIMLAYVYGVVPISLCRGGGCGVSTANGKGVKIEFDEDDGPITVADAWRALKNPSIGESSIEGLTSVLSTSGSPTDGLSVMQGPYSETASFAALSGGTLSGGILSSGKGKYSRLEVQADVQKEIFPKDTASLGAISDNASTRAMAGSIISSYNPQDRFSMIHA

SEQ ID NO: 4880 - protein, 492 aa, Homo sapiens
MAMALPMPGPQEAVVFEDVAVYFTRIEWSCLAPDQQALYRDVMLENYGNLASLGFLVAKPALISLLEQGEEPGALILQVAEQSVAKASLCTDSRMEAGIMESPLQRKLSRQAGLPGTVWGCLPWGHPVGGHPAPPHPHGGPEDGSDKPTHPRAREHSASPRVLQEDLGRPVGSSAPRYRCVCGKAFRYNSLLLRHQIVHTGAKPFQCTECGKAFKQSSILLRHQLIHTEEKPFQCGECGKAFRQSTQLAAHHRVHTRERPYACGECGKAFSRSSRLLQHQKFHTGEKPFACTECGKAFCRRFTLNEHGRIHSGERPYRCLRCGQRFIRGSSLLKHHRLHAQEGAQDGGAGQGALLGAAQRPQAGDPPHECPVCGRPFRHNSLLLLHLRLHTGEKPFECAECGKAFGRKSNLTLHQKIHTKEKPFACTECGKAFRRSYTLNEHYRLHSGERPYRCRACGRACSRLSTLIQHQKVHGREPGEDTEGRRAPCWAS

SEQ ID NO: 4881 - protein, 232 aa, Homo sapiens
MIRKVKVEDEDQEAEEEVEWPQHLSLLPSPFPAPDLGHLAAAYKLEPGAPGALSGLALSGWGPMPEKPYGCGECERRFRDQLTLRLHQRLHRGEGPCACPSLVRSPRGGAAPALLLSLVLTRTLSCPQFREARAMRPPGVSKATWAAARRFGRRGTPVSFPQCLRPHSIPSSDLLGQRLSEPLLGTAELKFLEGSHPGAPLESRYFPDPARPQPGQERVVIYVLKVSLKLKS

SEQ ID NO: 4882 - protein, 158 aa, Homo sapiens
MGRSPRKIDQFCNSSNMVHGSVTFRDVAIDFSQEEWECLQPDQRTLYRDVMLENYSHLISLGSSISKPDVITLLEQEKEPWMVVRKETSRRYPDLELKYGPEKVSPENDTSEVNLPKQISSLASKPSFTAIHIQRRIHCRICIAFGYLSLVYCSLEIL

SEQ ID NO: 4883 - protein, 296 aa, Homo sapiens
MAQRVKFPTDTLQELLDVHAACEREAIAIFMEHSFKDENQEFQKKFMETTMNKKGDFLLQNEESSVQYCQAKLNELSKGLMESISAGSFSVPGGHKLYMETKERIEQDYWQVPRKGVKAKEVFQRFLESQMVIEESILQSDKALTDREKAVAVDRAKKEAAEKEQELLKQKLQEQQQQMEAQVKSRKENIAQLKEKLQMEREHLLREQIMMLEHTQKVQNDWLHEGFKKKYEEMNAEISQFKRMIDTTKNDDTPWIARTLDNLADELTAILSAPAKLIGHGVKGVSSLFKKHKLPF

SEQ ID NO: 4884 - protein, 153 aa, Homo sapiens
MPRLPAHRHIPSFNPRGWEPNKLWQTDVTHIPEFGKLRYVHVSIDLISANALPGESTGYVTKHLLLTFAFMGQPTKIKTNNDLAYASSQFQQFCHMWNIQHSTGIPYNPQGQAIVECAHSTLKNMLKKQKRGVWVRTLQHYWHKPYLPLIFKI

SEQ ID NO: 4885 - protein, 562 aa, Homo sapiens
MLDTIARALQDLGRQVLPTLPSLSQEEVSIIWGNVSEFVRRQLTLHKGVQIPAFGTFTFIRQKLEVGNNKFILIQRPVFIMVGKLVQIHGLKQNKRPGTVDSVLSSREALRKWPSSVLAFPRIELKEMENKLPMETLVEECGENRERKCKLKDQSDKEEGTRDISSPKRLRDRQALFPAKVTNVSLLEKFERSESGGKIMTPESLSYPSCLKHDSEMKPQTSPACQDHNKAGQEMCYVCLQRAQRNSLLYYSEERRREIEDERLIQQYQMLKDQEALFRHQMKSLATREQNQKNAAYNLGVAEAIRNHKNEKPEFYKSFLFDKRPLSPALNALKQEEYSRSLLKQMDNRQENEIKQRQYRELMDRLEQVQLTEELAAQRAKFLKDKMEETQCYKRALDAQIKNKPSRLPPFEPDSSEPIFGKNEGELMVEKQKREQNYMKHQLEAAANHKRKAILHQLVDQRRDLQMLQRTQREHLADRTAELERVNRVNQCLQEDWERSAAMKKQRDLEDKAFERASDKLFLLDQCEKYRRCKQCQRRTSNVGESNLWPLNKFLPGSRLLV

SEQ ID NO: 4886 - protein, 385 aa, Homo sapiens
MPKKLLLLPPPSASSAFRVPRARPVPPPAMNAARTGYRVFSANSTAACTELAKRITERLGAELGKSVVYQETNGETRVEIKESVRGQDIFIIQTIPRDVNTAVMELLIMAYALKTACARNIIGVIPYFPYSKQSKMRKRGSIVCKLLASMLAKAGLTHIITMDLHQKEIQGFFSFPVDNLRASPFLLQYIQEEIPNYRNAVIVAKSPDAAKRAQSYAERLRLGLAVIHGEAQCTELDMDDGRHSPPMVKNATVHPGLELPLMMAKEKPPITVVGDVGGRIAIIVDYIIDDVESFVAAAEILKERGAYKIYVMATHGILSAEAPRLIEESSVDEVVVTNTVPHEVQKLQCPKIKTVDISLILSEAIRRIHNGESMAYLFRNITVDD

SEQ ID NO: 4887 - protein, 621 aa, Homo sapiens [sequence omitted]

SEQ ID NO: 4888 - protein, 267 aa, Homo sapiens
MFRRKAEGLDLASCVRSLDVLVLDEADRLLDMGFEASINTILEFLPKQRRTGLFSATQTQEVENLVRAGLRNPVRVSVKEKGVAASSAQKTPSRLENYYMVCKADEKFNQLVHFLRNHKQEKHLVFFSTCACVEYYGKALEVLVKGVKIMCIHGKMKYKRNKIFMEFRKLQSGILVCTDVMARGIDIPEVNWVLQYDPPSNASAFVHRCGRTARIGHGGSALVFLLPMEESYINFLAISQKVSCRPFSDRMPSDGVAGKVLQHVVSN

SEQ ID NO: 4889 - protein, 700 aa, Homo sapiens [sequence omitted]

SEQ ID NO: 4890 - protein, 174 aa, Homo sapiens
MISNLSWELPGSLPLISVPYSMHCCTLGFLSCSLFLHMSFELKLLLLLLWLAASCSLFLHSHAWLSECLIVRLYLGPLDSRPGVLKEPKLMGAISFFIFFFTLLVLARQNEYYCRLDFLWKKKLRQEREETETMENLTRLLLENVLPAHVAPQFIGQNRRNESPVPPGSLPPVL

SEQ ID NO: 4891 - protein, 546 aa, Homo sapiens
MIHTTEKPYRCNESGKAFHRGSLLTVHQIVHTRGKPYQCDVCGRIFRQNSDLVNHRRSHTGDKPYICNECGKSFSKSSHLAVHQRIHTGEKPYKCNRCGKCFSQSSSLATHQTVHTGDKPYKCNECGKTFKRNSSLTAHHIIHAGKKPYTCDVCGKVFYQNSQLVRHQIIHTGETPYKCNECGKVFFQRSRLAGHRRIHTGEKPYKCNECGKVFSQHSHLAVHQRVHTGEKPYKCNECGKAFNWGSLLTVHQRIHTGEKPYKCNVCGKVFNYGGYLSVHMRCHTGEKPLHCNKCGMVFTYYSCLARHQRMHTGEKPYKCNVCGKVFIDSGNLSIHRRSHTGEKPFQCNECGKVFSYYSCLARHRKIHTGEKPYKCNDCGKAYTQRSSLTKHLVIHTGENPYHCNEFGEAFIQSSKLARYHRNPTGEKPHKCSECGRTFSHKTSLVYHQRRHTGEMPYKCIECGKVFNSTTTLARHRRIHTGEKPYKCNECGKVFRYRSGLARHWSIHTGEKPYKCNECGKAFRVRSILLNHQMMHTGEKPYKCNEC

SEQ ID NO: 4892 - protein, 113 aa, Homo sapiens [sequence omitted]

SEQ ID NO: 4893 - protein, 129 aa, Homo sapiens
MMTDLKQSHSVRLNDGPFMPVLGFGTYAPDHTPKSQAAEATKVAIDVGFRHIDSAYLYQNEEEVGQAIWEKIADGTVKREEIFYTIKLWATFFRAELVHPALERSLKKLGPDYVDLFIIHVPFAMKGSS

SEQ ID NO: 4894 - protein, 105 aa, Homo sapiens
MCPVCGRALSSPGSLGRHLLIHSEDQRSNCAVCGARFTSHATFNRSAGHLSLLCWEQITGCEFCFLKSKRRLEIGNAKAADACSLEVQVRRLGNMPIPSHSPKGK

SEQ ID NO: 4895 - protein, 646 aa, Homo sapiens
MFLSISTRLPSQYIYGFGETEHTTFRRNMNWNTWGMFAHDEPPAYKKNSYGVHPYYMALEEDGSAHGVLLLNSNAMDVTLQPTPALTYRTTGGILDFYIVLGPTPELVTQQYTELIGRPAMIPYWALGFHLSRYGYQNDAEISSLYDAMVAAQIPYDVQHVDIDYMNRKLDFTLSANFQNLSLLIEQMKKNGMRFILILDPAISGNETQYLPFIRGQENNVFIKWPDTNDIVWGKVWPDLPNVIVDGSLDHETQVKLYRAYVAFPDFFRNSTAAWWKKEIEELYANPREPEKSLKFDGLWIDMNEPSNFVDGSVRGCSNEMLNNPPYMPYLESRDKGLSSKTLCMESQQILPDSSPVEHYNVHNLYGWSQTRPTYEAVQEVTGQRGVIITRSTFPSSGRWGGHRLGNNTAAWDQLGKSIIGMMEFSLFGIPYTGADICGFFGDAEYEMCVRWMQLGAFYPFSRNHNNIGTRRQDPVAWNSTFEMLSRKVLETRYTLLPYLYTLMHKAHVEGSTVVRPLLHEFTDDRTTWDIDRQFMLGPAILISPVLETSTFEISAYFPRARWYDYSTGTSSTSTGQRKILKAPLDHINLHVRGGYILPWQEPAMNTHSSRQNFMGLIVALDDNGTAEGQVFWDDGQSIVFNTTAM

SEQ ID NO: 4896 - protein, 472 aa, Homo sapiens
MASPPRCSPTAHDRECKLPPPSAPASEYCPGKLSWGTMARALGRFKLSIPHTHLLATLDPLALDREPPPHLLPEKHQVPEKLIWGDQDPLSKIPFKILSGHEHAVSTCHFCVDDTKLLSGSYDCTVKLWDPVDGSVVRDFEHRPKAPVVECSITGDSSRVIAASYDKTVRAWDLETGKLLWKVRYDTFIVSCKFSPDGKYVVSGFDVDHGICIMDAENITTVSVIKDHHTRSITSCCFDPDSQRVASVSLDRCIKIWDVTSQATLLTITKAHSNAISNCCFTFSGHFLCTSSWDKNLKIWNVHTGEFRNRGACVTLMQGHEGSVSSCHFARDSSFLISGGFDRTVAIWDVAEGYRKLSLKGHNDWVMDVAISNNKKWILSASKDRTMRLWNIEEIDEIPLVIKYKKAVGLKLKQCERCDRPFSIFKSDTSSEMFTQCVFCRIDTRGLPADTSSSSSSSERENSPPPRGSKDD

SEQ ID NO: 4897 - protein, 466 aa, Homo sapiens [sequence omitted]

SEQ ID NO: 4898 - protein, 679 aa, Homo sapiens [sequence omitted]

SEQ ID NO: 4899 - protein, 1148 aa, Homo sapiens
MVLNLYQLNQLDCPGGRLIGGWEDNPFKGDLKIVLRGNHTTQDWALPEGPNQGAKVLGVFGELDLHGIPHSIYKTKLSETAFAGSKVLSLMDAVDWQEGEEIVITTTSYDFHQTETRSIVKILHDHKILILNDSLSYTHFAEKYHVPGTGESYTLAADVGILSRNIKIVGEDYPGWSEDSFGARVLVGSFTENMMTFKGNARISNVEFYHSGQEGFRDSTDPRYAVTFLNLGQIQEHGSSYIRGCAFHHGFSPAIGVFGTDGLDIDDNIIHFTVGEGIRIWGNANRVRGNLIALSVWPGTYQNRKDLSSTLWHAAIEINRGTNTVLQNNVVAGFGRAGYRIDGEPCPGQFNPVEKWFDNEAHGGLYGIYMNQDGLPGCSLIQGFTIWTCWDYGIYFQTTESVHIYNVTLVDNGMAIFPMIYMPAAISHKISSKNVQIKSSLIVGSSPGFNCSDVLTNDDPNIELTAAHRSPRSPSGGRSGIRWPTFASAHNMAPRKPHAGIMSYNAISGLLDISGSTFVGFKNVCSGETNVIFITNPLNEDLQHPIHVKNIKLVDTTEQSKIFIHRPDISKVNPSDCVDMVCDAKRKSFLRDIDGSFLGNAGSVIPQAEYEWDGNSQVGIGDYRIPKAMLTFLNGSRIPVTEKAPHKGIIRDSTCKYLPEWQSYQCFGMEYAMMVIESLDPDTETRRLSPVAIMGNGYVDLINGPQDHGWCAGYTCQRRLSLFHSIVALNKSYEVYFTGTSPQNLRLMLLNVDHNKAVLVGIFFSTLQRLDVYVNNLLVCPKTTIWNAQQKHCELNNHLYKDQFLPNLDSTVLGENYFDGTYQMLYLLVKGTIPVEIHTATVIFVSFQLSVATEDDFYTSHNLVKNLALFLKIPSDKIRISKIRGKSLRRKRSMGFIIEIEIGDPPIQFISNGTTGQMQLSELQEIAGSLGQAVILGNISSILGFNISSMSITNPLPSPSDSGWIKVTAQPVERSAFPVHHVAFVSSLLVITQPVAAQPGQPFPQQPSVKATDSDGNCVSVGITALTLRAILKDSNNNQVNGLSGNTTIPFSSCWANYTDLTPLRTGKNYKIEFILDNVVGVESRTFSLLAESVSSSGSSSSSNSKASTVGTYAQIMTVVISCLVGRMWLLEIFMAAVSTLNITLRSY

SEQ ID NO: 4900 - protein, 300 aa, Homo sapiens
MHSLKKVTFEDVAIDFTQEEWAMMDTSKRKLYRDVMLENISHLVSLGYQISKSYIILQLEQGKELWREGREFLQDQNPDRESALKKKHMISMHPITRKDASTSMTMENSLILEDPFECNDSGEDCTHSSTITQRLLTHSGKKPYVSKQCGKSLRNLFSPKPHKQIHTKGKSYQCNLCEKAYTNCFRLRRHKMTHTGERPYACHLCGKAFTQCSHLRRHEKTHTGERPYKCHQCGKAFIQSFNLRRHERTHLGKKCYECDKSGKAFSQSSGFRGNKIIHTGEKPHACLLCGKAFSLSSDLR

SEQ ID NO: 4901 - protein, 1216 aa, Homo sapiens
MSQAGDVEGPSTGDPVLSPQHNCELLQNMEGASSMPGLSPDGPGASSGPGVRAGSRRKIPRKEALRGGSSRAAGAAEVRPGVLELLAVVQSRGSMLAPGLHMQLPSVPTQGRALTSKRLQVSLCDILDDSCPRKLCSRSAGLPERALACRERLAGVEEVSCLRPREARDGGMSSPGCDRRSPTLSKEEPPGRPLTSSPDPVPVRVRKKWRRQGAHSECEEGAGDFLWLDQSPRGDNLLSVGDPPQVADLESLGGPCRPPSPKDTGSGPGEPGGSGAGCASGTEKFGYLPATGDGPQPGSPCGPVGFPVPSGGESLSSAAQAPPQSAALCLGASAQASAEQQEAVCVVRTGSDEGQAPAQDQEELEAKAQPASRGRLEQGLAAPADTCASSREPLGGLSSSLDTEASRACSGPFMEQRRSKGTKNLKKGPVPCAQDRGTDRSSDNSHQDRPEEPSPGGCPRLEEVKIPHGVKLVCYLGSGPVIQLLGAISHGQAGGQLPPKLEVLEDLMEVSSPSPAQRLRRKKRPMVQGPAGCQVFQPSPSGGTAGDPGGLSDPFYPPRSGSLALGDPSSDPACSQSGPMEAEEDSLPEQPEDSAQLQQEKPSLYIGVRGTVVRSMQEVLWTRLRELPDPVLSEEVVEGIAAGIEAALWDLTQGTNGRYKTKYRSLLFNLRDPRNLDLFLKVVHGDVTPYDLVRMSSMQLAPQELARWRDQEEKRGLNIIEQQQKEPCRLPASKMTHKGEVEIQRDMDQTLTLEDLVGPQMFMDCSPQALPIASEDTTGQHDHHFLDPNCHICKDWEPSNELLGSFEAAKSCGDNIFQKALSQTPMPAPEMPKTRELSPTEPQDRVPPSGLHVPAAPTKALPCLPPWEGVLDMFSIKRFRARAQLVSGHSCRLVQALPTVIRSAGCIPSNIVWDLLASICPAKAKDVCVVRLCPHGARDTQNCRLLYSYLNDRQRHGLASVEHMGMVLLPLPAFQPLPTRLRPLGGPGLWALPVSPLLSPGLEVTHSSLLLAVLLPKEGLPDTAGSSPWLGKVQKMVSFNSKVEKRYYQPDDRRPNVPLKGTPPPGGAWQQSQGRGSIAPRGISAWQRPPRGRGRLWPEPENWQHPGRGQWPPEPGLRQSQHPYSVAPAGHGFGRGQHFHRDSCPHQALLRHLESLATMSHQLQALLCPQTKSSIPRPLQRLSSALAAPEPPGPARDSSLGPTDEAGSECPFPRKA

SEQ ID NO: 4902 - protein, 435 aa, Homo sapiens [sequence omitted]

SEQ ID NO: 4903 - protein, 171 aa, Homo sapiens
MGKSEIKRTGGFGSTNKQGKAAYWVNQITDKCPTCEITIQGKKFKGLVDTRADISIISLQHWPSTWPIQPTQFNIVGVGEAPEVYQSSSVLPCEGPDGQPETIQPIITSVSINLWGRDLLQQCRAQVLIPEQLYSPQSQHMMHEMGYVPGMGLQKNLQGLKSSRQRLGNNF

SEQ ID NO: 4904 - protein, 599 aa, Homo sapiens
MDPPMDDQPGEKELVKRSQLDGEGDGPLSNQLSASSTINPVPLVGLQKPEMSLPVKPGQGDSEASSPFTPVADEDSVVFSKLTYLGCASVNAPRSEVEALRMMSILRSQCQISLDVTLSVPNVSEGIVRLLDPQTNTEIANYPIYKILFCVRGHDGTPESDCFAFTESHYNAELFRIHVFRCEIQEAVSRILYSFATAFRRSAKQTPLSATAAPQTPDSDIFTFSVSLEIKEDDGKGYFSAVPKDKDRQCFKLRQGIDKKIVIYVQQTTNKELAIERCFGLLLSPGKDVRNSDMHLLDLESMGKSSDGKSYVITGSWNPKSPHFQVVNEETPKDKVLFMTTAVDLVITEVQEPVRFLLETKVRVCSPNERLFWPFSKRSTTENFFLKLKQIKQRERKNNTDTLYEVVCLESESERERRKTTASPSVRLPQSGSQSSVIPSPPEDDEEEDNDEPLLSGSGDVSKECAEKILETWGELLSKWHLNLNVRPKQLSSLVRNGVPEALRGEVWQLLAGCHNNDHLVEKYRILITKESPQDSAITRDINRTFPAHDYFKDTGGDGQDSLYKICKVFHVKKKKDSILSGGSTLKLHKKQLQSVICI

SEQ ID NO: 4905 - protein, 1340 aa, Homo sapiens [sequence omitted]

SEQ ID NO: 4906 - protein, 574 aa, Homo sapiens
MTAGSVCVPQIIPLRVPQPGKANHEIDNNTLLEMKSDTPDVNIYYTLDGSKPEFLKRIGYGENNTFKYIKPITLPDGKIQVKAIAVSKDCRQSGIVTKVFHVDYEPPNIVSPEDNVENVLKDSSRQEFKNGFVGSKLKKKYKNSENQRSWNVNLRKFPESPLEIPAYGGGSGSRPPTRQSQSPGFAHVSGQKCLTSTEIMRIQRETDFLKCAHCLAPRPSDPFARFCQECGSPVPPIFGCRLPPPEGAQMGLCAECRSLVPMNTPICVVCEAPLALQLQPQASLHLKEKVICRACGTGNPAHLRYCVTCEGALPSSQESMCSGDKAPPPPTQKGGTISCYRCGRWNLWEASFCGWCGAMLGIPAGCSVCPKCGASNHLSARFCGSCGICVKSLVKLSLDRSLALAAEEPRPFSESLNIPLPRSDVGTKRDIGTQTVGLFYPSGKLLAKKEQELASQKQRQEKMSDHKPLLTAISPGRGYWRRQLDHISAHLRCYAQNNPEFRALIAEPRMGKLISATVHEDGCEVSIRLNYSQVSNKVRKLRLREVKQPASSKGTKLVSGRPRIHTWQPETFPS

SEQ ID NO: 4907 - protein, 534 aa, Homo sapiens [sequence omitted]

SEQ ID NO: 4908 - protein, 1300 aa, Homo sapiens
MPPDVIRDILEGVLRLMGIFDTSWVSMKSFLAKRGVREDIATFDARNISKEIRESVEELLFKNKGSFDPKNAKRASTAAAPLAAWVKANIQYSHVLERIHPLETEQAGLESNLKKTEDRKRKLEELLNSVGQKVSELKEKFQSRTSEAAKLEAEVSKAQETIKAAEVLINQLDREHKRWNAQVVEITEELATLPKRAQLAAAFITYLSAAPESLRKTCLEEWTKSAGLEKFDLRRFLCTESEQLIWKSEGLPSDDLSIENALVILQSRVCPFLIDPSSQATEWLKTHLKDSRLEVINQQDSNFITALELAVRFGKTLIIQEMDGVEPVLYPLLRRDLVAQGPRYVVQIGDKIIDYNEEFRLFLSTRNPNPFIPPDAASIVTEVNFTTTRSGLRGQLLALTIQHEKPDLEEQKTKLLQQEEDKKIQLAKLEESLLETLATSQGNILENKDLIESLNQTKASSALIQESLKESYKLQISLDQERDAYLPLAESASKMYFIISDLSKINNMYRFSLAAFLRLFQRALQNKQDSENTEQRIQSLISSLQHMVYEYICRCLFKADQLMFALHFVRGMHPELFQENEWDTFTGVVVGDMLRKADSQQKIRDQLPSWIDQERSWAVATLKIALPSLYQTLCFEDAALWRTYYNNSMCEQEFPSILAKKVSLFQQILVVQALRPDRLQSAMALFACKTLGLKEVSPLPLNLKRLYKETLEIEPILIIISPGADPSQELQELANAERSGECYHQVAMGQGQADLAIQMLKECARNGDWLCLKNLHLVVSWLPVLEKELNTLQPKDTFRLWLTAEVHPNFTPILLQSSLKITYESPPGLKKNLMRTYESWTPEQISKKDNTHRAHALFSLAWFHAACQERRNYIPQGWTKFYEFSLSDLRAGYNIIDRLFDGAKDVQWEFVHGLLENAIYGGRIDNYFDLRVLQSYLKQFFNSSVIDVFNQRNKKSIFPYSVSLPQSCSILDYRAVIEKIPEDDKPSFFGLPANIARSSQRMISSQVISQLRILGRSITAGSKFDREIWSNELSPVLNLWKKLNQNSNLIHQKVPPPNDRQGSPILSFIILEQFNAIRLVQSVHQSLAALSKVIRGTTLLSSEVQKLASALLNQKCPLAWQSKWEGPEDPLQYLRGLVARALAIQNWVDKAEKQALLSETLDLSELFHPDTFLNALRQETARAVGRSVDSLKFVASWKGRLQEAKLQIKISGLLLEGCSFDGNQLSENQLDSPSVSSVLPCFMGWIPQDACGPYSPDECISLPVYTSAERDRVVTNIDVPCGGNQDQWIQCGAALFLKNQ

SEQ ID NO: 4909 - protein, 944 aa, Homo sapiens
MGSDGILRLSTSALNNEFFAYAAQGWKQRLAEGEFTPEMQLRIRQEIEKEKKTEPWKEKFFERFYGEKLGMSREESVKLTTGPNNAGAQSSSSCGTSGLPVSAQTALAEQQPKSMKSPASPEPGFCATLCPMVEIPPKDIMAELESEDILIPEESVIQEEIAEEVETSICECQDENHKTIPEFSEEAESLTNSHEEPQIAPPEDNLESCVMMNDVLETLPHIEVKIEGKSESPQEEMTVVIDQLEVCDSLIPSTSSMTHVSDTEHKESETAVETSTPKIKTGSSSLEGQFPNEGIAIDMELQSDPEEQLSENACISETSFSSESPEGACTSLPSPGGETQSTSEESCTPASLETTFCSEVSSTENTDKYNQRNSTDENFHASLMSEISPISTSPEISEASLMSNLPLTSEASPVSNLPLTSETSPMSDLPLTSKTSSVSSMLLTSETTFVSSLPLPSETSPISNSSINERMAHQQRKSPSVSEEPLSPQKDESSATAKPLGENLTSQQKNLSNTPEPIIMSSSSIAPEAFPSEDLHNKTLSQQTCKSHVDTEKPYPASIPELASTEMIKVKNHSVLQRTEKKVLPSPLELSVFSEGTDNKGNELPSAKLQDKQYISSVDKAPFSEGSRNKTHKQGSTQSRLETSHTSKSSEPSKSPDGIRNESRDSEISKRKTAEQHSFGICKEKRARIEDDQSTRNISSSSPPEKEQPPREEPRVPPLKIQLSKIGPPFIIKSQPVSKPESRASTSTSVSGGRNTGARTLADIKARAQQARAQREAAAAAAVAAAASIVSGAMGSPGEGGKTRTLAHIKEQTKAKLFAKHQARAHLFQTSKETRLPPPLSSKEGPPNLEVSSTPETKMEGSTGVIIVNPNCRSPSNKSAHLRETTTVLQQSLNPSKLPETATDLSVHSSDENIPVSHLSEKIVSSTSSENSSVPMLFNKNSVP

SEQ ID NO: 4910 - protein, 1161 aa, Homo sapiens
MCSTPGMPAPGASLALRVSFVDVHPDVIPVQLWGLVGERRGEYLRLSREIQEAAATRGQWALGSASASPGELCLVQVGLLWHRCRVVSRQAQESRVFLLDEGRTITAGAGSLAPGRREFFNLPSEVLGCVLAGLVPAGCGAGSGEPPQHWPADAVDFLSNLQGKEVHGCVLDVLLLHRLVLLEVPDVFQQMRELGLARRVPDSLFRSLLERYLTAATASVGSGVPVLSRVPLKQKQPGLDYFYPQLQLGVTEAVVITQVCHPHRIHCQLRSVSQEIHRLSESMAQVYRGSTGTGDENSTSATWEEREESPDKPGSPCASCGLDGHWYRALLLETFRPQRCAQVLHVDYGRKELVSCSSLRYLLPEYFRMPVVTYPCALYGLWDGGRGWSRSQVGDLKTLILGKAVNAKIEFYCSFEHVYYVSLYGEDGINLNRVFGVQSCCLADRVLQSQATEEEEPETSQSQSPAEEVDEEISLPALRSIRLKMNAFYDAQVEFVKNPSEFWIRLRKHNVTFSKLMRRMCGFYSSASKLDGVVLKPEPDDLCCVKWKENGYYRAIVTKLDDKSVDVFLVDRGNSENVDWYDVRMLLPQFRQLPILAVKCTLADIWPLGKTWSQEAVSFFKKTVLHKELVIHILDKQDHQYVIEILDESRTGEENISKVIAQAGYAKYQEFETKENILVNAHSPGHVSNHFTTESNKIPFAKTGEGEQKAKRENKTTSVSKALSDTTVVTNGSTELVVQEKVKRASVYFPLMQNCLEIKPGSSSKGELEVGSTVEVRVSYVENPGYFWCQLTRNIQGLKTLMSDIQYYCKNTAAPHQRNTLACLAKRTVNRQWSRALISGIQSVEHVNVTFVDYGDREMVSVKNIYSISEEFLKVKAQAFRCSLYNLIQPVGQNPFVWDVKAIQAFNEFIDNAWQKNLELKCTIFALASINEELFNIVDLLTPFQSACHFLVEKRLARPVKLQKPLESSVQLHSYFYSTHDMKIGSEELVYITHIDDPWTFYCQLARNANILEQLSCSITQLSKVLLNLKTSPLNPGTLCLAKYTDGNWYRGIVIEKEPKKVFFVDFGNIYVVTSDDLLPIPSDAYDVLLLPMQAVRCSLSDIPDHIPEEVVVWFQETILDKSLKALVVAKDPDGTLIIELYGDNIQISASINKKLGLLSY

SEQ ID NO: 4911 - protein, 762 aa, Homo sapiens
MGDLKSGFEEVDGVRLGYLIIKGKQMFALSQVFTDLLKNIPRTTVHKRMDHLKVKKHHCDLEELRKLKAINSIAFHAAKCTLISREDVEALYTSCKTERVLKTKRRRVGRALATKAPPPERAAAASPRPGFWKDKHQLWRGLSGAARPLPISAQSQRPGAAAARPAAHLPQIFSKYPGSHYPEIVRSPCKPPLNYETAPLQGNYVAFPSDPAYFRSLLCSKHPAAAAAGATCLERFHLVNGFCPPPHHHHHHHHHHHHHHHRAQPPQQSHHPPHHHRPQPHLGSFPESCSSDSESSSYSDHAANDSDFGSSLSSSSNSVSSEEEEEEGEEEEEEEEEEEEGGSGASDSSEVSSEEEDSSTESDSSSGSSQVSVQSIRFRRTSFCKPPSVQAQANFLYHLASAAAATKPAAFEDAGRLPDLKSSVKAESPAEWNLQSWAPKASPVYCPASLGSCFAEIRNDRVSEITFPHSEISNAVKRTDLTINCLAEGASSPSPKTNNAFPQQRILREARKCLQTTPTTHCADNNTIAARFLNNDSSGAEANSEKYSKILHCPEFATDLPSSQTDPEVNAAGAAATKAENPCTDTGDKTLPFLHNIKIKVEDSSANEEYEPHLFTNKLKCECNDTKGEFYSVTESKEEDALLTTAKEGFACPEKETPSLNPLAQSQGLSCTLGSPKPEDGEYKFGARVRKNYRTLVLGKRPVLQTPPVKPNLKSARSPRPTGKTETNEGTLDDFTVINRRKKVASNVASAVKRPFHFMANK

SEQ ID NO: 4912 - protein, 619 aa, Homo sapiens [sequence omitted]

SEQ ID NO: 4913 - protein, 164 aa, Homo sapiens [sequence omitted]

SEQ ID NO: 4914 - protein, 236 aa, Homo sapiens [sequence omitted]

SEQ ID NO: 4915 - protein, 390 aa, Homo sapiens [sequence omitted]

SEQ ID NO: 4916 - protein, 619 aa, Homo sapiens [sequence omitted]

SEQ ID NO: 4917 - protein, 1103 aa, Homo sapiens
MHFLAAQNQFLHSPFLERPMDMPYMIFDPNNPLMTGQLLGSSLTQMPPQASSSHTTAPTTVAASLKRKLDDKEDNNCSEKEGGNSGEDQHRDKRLRTTITPEQLEILYEKYLLDSNPTRKMLDHIAREVGLKKRVVQVWFQNTRARERKGQFRAVGPAQSHKRCPFCRALFKAKSALESHIRSRHWNEGKQAGYSLPPSPLISTEDGGESPQKYIYFDYPSLPLTKIDLSSENELASTVSTPVSKTAELSPKNLLSPSSFKAECSEDVENLNAPPAEAGYDQNKTDFDETSSINTAISDATTGDEGNTEMESTTGSSGDVKPALSPKEPKTLDTLPKPATTPTTEVCDDKFLFSLTSPSIHFNDKDGDHDQSFYITDDPDDNADRSETSSIADPSSPNPFGSSNPFKSKSNDRPGHKRFRTQMSNLQLKVLKACFSDYRTPTMQECEMLGNEIGLPKRVVQVWFQNARAKEKKFKINIGKPFMINQGGTEGTKPECTLCGVKYSARLSIRDHIFSKQHISKVRETVGSQLDREKDYLAPTTVRQLMAQQELDRIKKASDVLGLTVQQPGMMDSSSLHGISLPTAYPGLPGLPPVLLPGMNGPSSLPGFPQNSNTLTPPGAGMLGFPTSATSSPALSLSSAPTKPLLQTPPPPPPPPPPPPSSSLSGQQTEQQNKESEKKQTKPNKVKKIKEEELEATKPEKHPKKEEKISSALSVLGKVVGETHVDPIQLQALQNAIAGDPASFIGGQFLPYFIPGFASYFTPQLPGTVQGGYFPPVCGMESLFPYGPTMPQTLAGLSPGALLQQYQQYQQNLQESLQKQQKQQQEQQQKPAQAKTSKVESDQPQNSNDASETKEDKSTATESTKEEPQLESKSADFSDTYVVPFVKYEFICRKCQMMFTDEDAAVNHQKSFCYFGQPLIDPQETVLRVPVSKYQCLACDVAISGNEALSQHLQSSLHKEKTIKQAMRNAKEHVRLLPHSVCSPNPNTTSTSQSAASSNNTYPHLSCFSMKSWPNILFQASARRAASPPSSPPSLSLPSTVTSSLCSTSGVQTSLPTESCSDESDSELSQKLEDLDNSLEVKAKPASGLDGNFNSIRMDMFSV

SEQ ID NO: 4918 - protein, 727 aa, Homo sapiens
MQQKTKLFPQALKYSIPHLGKCMQKQHLNHYNFADHCYNRIKLKKYHLTKCLQNKPKISELARNIPSRSFSCKDLQPVKQENEKPLPENTDAFEKVRTKLETQPQEEYEIINVEVKHGGFVYYQEGCCLVRSKDEEADNDNYEVLFNLEELKLDQPFIDCIRVAPDEKYVAAKIRTEDSEASTCVIIKLSDQPVMEASFPNVSSFEWVKDEEDEDVLFYTFQRNLRCHDVYRATFGDNKRNERFYTEKDPSYFVFLYLTKDSRFLTINIMNKTTSEVWLIDGLSPWDPPVLIQKRIHGILYYVEHRDDELYILTNVGEPTEFKLMRTAADTPAIMNWDLFFTMKRNTKVIDLDMFKDHCVLFLKHSNLLYVNVIGLADDSVRSLKLPPWACGFIMDTNSDPKNCPFQLCSPIRPPKYYTYKFAEGKLFEETGHEDPITKTSRVLRLEAKSKDGKLVPMTVFHKTDSEDLQKKPLLVHVYGAYGMDLKMNFRPERRVLVDDGWILAYCHVRGGGELGLQWHADGRLTKKLNGLADLEACIKTLHGQGFSQPSLTTLTAFSAGGVLAGALCNSNPELVRAVTLEAPFLDVLNTMMDTTLPLTLEELEEWGNPSSDEKHKNYIKRYCPYQNIKPQHYPSIHITAYENDERVPLKGIVSYTEKLKEAIAEHAKDTGEGYQTPNIILDIQPGGNHVIEDSHKKITAQIKFLYEELGLDSTSVFEDLKKYLKF

SEQ ID NO: 4919 - protein, 378 aa, Homo sapiens
MEDRDESEVSDEGGSPISSEGQEPRADPEPPGLAAGLVQQDLVFEVETPAVLPEPVPQEDGVDLLGLHSEVGAGPAVPPQACKAPSSNTDLLSCLLGPPEAASQGPPEDLLSEDPLLLASPAPPLSVQSTPRGGPPAAADPFGPLLPSSGNNSQPCSNPDLFGEFLNSDSVTVPPSFPSAHSAPPPSCSADFLHLGDLPGEPSKMTASSSNPDLLGGWAAWTETAASAVAPTPATEGSPAGFPPGGFIPKTATTPKGSSSWQTSRPPAQGASWPPQAKPPPKACTQPRPNYASNFSVIGAREERGVRAPSFGESPTLCCCGVCRDLPELAKGRTYVVFFISEPSPGTGTAKPLRERRGFRCVFTGLSLGQASGSLLFQ

SEQ ID NO: 4920 - protein, 168 aa, Homo sapiens
MEEIRFPRTLGPEAKSLLSGLLKKDPKQRLGGGSEDAKEIMQHRFFAGIVWQHVYEKKVRLLPAYSRARMLPTYPHSRMHVARSPDFPHTRPHLRSLLQSWYKEGLAAPTSAPGAQRLWHCRVPPGNWPGPHFLLPSEVCHTLSFLLPSEVCHTLSASLGVPFPDAVQ

SEQ ID NO: 4921 - protein, 219 aa, Homo sapiens
MVGGRSCPLRQVWVGNKSGLLVGAEAGGSAADGVTPPQECILSGIMSVNGKKVLHMDRNPYYGGESSSITPLEELYKRFQLLEGPPESMGRGRDWNVDLIPKFLMANGQLVKMLLYTEVTRYLDFKVVEGSFVYKGGKIYRVPSTETEALASNLMGMFEKRRFRKFLVFVANFDENDPKTFEGVDPQTTSMRDVYRKFDLGQDVIDFTGHALALYRTDE

SEQ ID NO: 4922 - protein, 419 aa, Homo sapiens
MLRCFHSKGVNYINFSATGKLLVSVGVDPEHTITVWRWQEGAKVASRGGHLERIFVVEFRPDSDTQFVSVGVKHMKFWTLAGSALLYKKGVIGSLGAAKMQTMLSVAFGANNLTFTGAINGDVYVWKDHFLIRLVAKAHTGPVFTMYTTLRDGLIVTGGKERPTKEGGAVKLWDQEMKRCRAFQLETGQLVECVRSVCRGKGKILVGTKDGEIIEVGEKNAASNILIDGHMEGEIWGLATHPSKDLFISASNDGTARIWDLADKKLLNKVSLGHAARCAAYSPDGEMVAIGMKNGEFVILLVNSLKVWGKKRDRKSAIQDIRISPDNRFLAVGSSEHTVDFYDLTQGTNLNRIGYCKDIPSFVIQMDFSADGEYIQMQLTLLVGNHTQRTAILGLWKIARKWMRRKMGKWPAVVVMGWP

SEQ ID NO: 4923 - protein, 699 aa, Homo sapiens
MNTFQASVSFQDVTVEFSQEEWQHMGPVERTLYRDVMLENYSHLVSVGYCFTKPELIFTLEQGEDPWLLEKEKGFLSRNSPEDSQPDEISEKSPENQGKHLLQVLFTNKLLTTEQEISGKPHNRDINIFRARMMPCKCDIAGSACQGLSLMAPHCQYSKEKAHERNVCDKWLISIKDGRTNTQEKSFAYSKIVKTLHHKEEVIQHQTIQTLGQDFEYNESRKAFLEKAALVTSNSTHPKGKSYNFNKFGENKYDKSTFIIPQNMNPEKSHYEFNDTGNCFCRITHKTLTGGKSFSQKSHIREHHRVHIGVKPFEYGKSFNRNSTLPVHQRTHATDKYSDYHPCTETFSYQSTFSVHQKVHIRAKPYEYNECGKSCSMNSHLIWPQKSHTGEKPYECPECGKAFSEKSRLRKHQRTHTGEKPYKCDGCDKAFSAKSGLRIHQRTHTGEKPFECHECGKSFNYKSILIVHQRTHTGEKPFECNECGKSFSHMSGLRNHRRTHTGERPYKCDECGKAFKLKSGLRKHHRTHTGEKPYKCNQCGKAFGQKSQLRGHHRIHTGEKPYKCNHCGEAFSQKSNLRVHHRTHTGEKPYQCEECGKTFRQKSNLRGHQRTHTGEKPYECNECGKAFSEKSVLRKHQRTHTGEKPYNCNQCGEAFSQKSNLRVHQRTHTGEKPYKCDKCGRTFSQKSSLREHQKAHPGD

SEQ ID NO: 4924 - protein, 319 aa, Homo sapiens
MEYPAPATVQAADGGAAGPYSSSELLEGQEPDGVRFDRERARRLWEAVSGAQPVGREEAQFFPHSRTVIPILVLSETYSLCHPVEHMIQKNQCLFTNTQCKVCCALLISESQKLAHYQSKKHANKVKRYLAIHGMETLKGETKKLDSDQKSSRSKDKNQCCPICNMTFSSPVVAQSHYLGKTHAKNLKLKQQSTKVEALHQNREMIDPDKFCSLCHATFNDPVMAQQHYVGKKHRKQETKLKLMARYGRLADPAVTDFPAGKGYPCKTCKIVLNSIEQYQAHVSGFKHKNQSPKTVASSLGQIPMQRQPIQKDSTTLED

SEQ ID NO: 4925 - protein, 458 aa, Homo sapiens [sequence omitted]

SEQ ID NO: 4926 - protein, 814 aa, Homo sapiens
MVKQTIQIFARVKPPVRKHQQGIYSIDEDEKLIPSLEIILPRDLADGFVNNKRESYKFKFQRIFDQDANQETVFENIAKPVAGSVLAGYNGTIFAYGQTGSGKTFTITGGAERYSDRGIIPRTLSYIFEQLQKDSSKIYTTHISYLEIYNECGYDLLDPRHEASSLEDLPKVTILEDPDQNIHLKNLTLHQATTEEEALNLLFLGDTNRMIAETPMNQASTRSHCIFTIHLSSKEPGSATVRHAKLHLVDLAGSERVAKTGVGGHLLTEAKYINLSLHYLEQVIIALSEKHRSHIPYRNSMMTSVLRDSLGGNCMTTMIATLSLEKRNLDESISTCRFAQRVALIKNEAVLNEEINPRLVIKRLQKEIQELKDELAMVTGEQRTEALTEAELLQLEKLITSFLEDQDSDSRLEVGADMRKVHHCFHHLKKLLNDKKILENNTVSSESKDQDCQEPLKEEEYRKLRDILKQRDNEINILVNMLKKEKKKAQEALHLAGMDRREFRQSQSPPFRLGNPEEGQRMRLSSAPSQAQDFSILGKRSSLLHKKIGMKEEMSLGCQEAFEIFKRDHADSVTIDDNKQILKQRFSEAKALGESINEARSKIGHLKEEITQRHIQQVALGISENMAVPLMPDQQEEKLRSQLEEEKRRYKTMFTRLKALKVEIEHLQLLMDKAKVKLQKEFEVWWAEEATNLQVNSPAVNSLDHTKPFLQTSDFQHERSQLLSNKSSGGWEVQDQGTGRFDVCDVNARKILPSPCPSPHSQKQSSTSTPLGDSIPKRPVSSIPLTGDSQTDSDIIAFIKARQSILQKQCLGSN

SEQ ID NO: 4927 - protein, 503 aa, Homo sapiens
MGALTFRDVAIEFSLEEWQCLDTEQQNLYRNVMLDNYRNLVFLGIAVSKPDLITCLEQEKEPWNLKTHDMVAKPPVICSHIAQDLWPEQGIKDYFQEVILRQYKKCRHENLLLRKGCKNVDEFKMHKKGYNRHNQCLTTSHSKIFQCDKYVKVFHKFSNSNRHKIRHTSKKPFKCKECGKLFCILSHLAQHKKIHTGEKSYKCEEYGKAFNESSNCTTHKRITEKKPYKCKECGKAFNWFSHFTTHKRIHTGEKPYQCEKCGKFFNQSTNLTTHKRIHTGEKPYKCEECGKAFNQSSNLTEHKKIHTKEQPYKCEKCGKAFKWSSTLTKHKRIHNGEKPYKCEECGKAFNRSSTLNRHKITHTGGKPYKYKECGKAFNQSSTLTIHKIIHTVEKFYKCEECGKAFSRISHLTTHKRIHTGEKPYKCEECGRAFNQSSTLTTHKRIHTGEKPYECEECGKAFNRSSTLTTHKIIHSGEKIYKCKECGKAFRRFSHLTRHKTIHT

SEQ ID NO: 4928 - protein, 388 aa, Homo sapiens
MLLKEKEDSLMTCQQIYKALQEELTVKEKQEEDIKRRINLAENELEITKTLLNQTREEVLTLKNERELMLISHQKSIEQLQETLRQKLLSDDNWKEKIEAELAKERAQHLVEFEEQALLFKEETKLQLDIEKEKHQDVIQKYKKEQEELQMKISDLITGATRDLRQEVTTLKEKLHKSHTRYTEESNSKEKEIENLKNLVAEFESRLKKEIDSNDSVSENLRKEMEQKSDELKRVMLAQTQLIEQFNQSQEENTFLQETVRRECEERFELTEALSQAREQLLELSKLRGSLPFSPCSLSKGSLTSPAAAVSNHGERSLARLNSEKGIQIPNLRGVSKPTTFPTSDKPKRVRSGVPILPQPHPPRGGASSANETRQRLAAILRRRRSQQ

SEQ ID NO: 4929 - protein, 165 aa, Homo sapiens [sequence omitted]

SEQ ID NO: 4930 - protein, 832 aa, Homo sapiens
MAGLRYSVKVYVLNEDEEWNNLGTGQVSSTYDEQFQGMSLLVRSDSDGSVILRSQIPPDRPYGKYQETLIVWYEAENQGLVLKFQDPAGCQDIWKEICQAQGKDPSIQTTVNISDEPEEDFNEMSVISNMVVLPDCELNTLDQIADIVTSVFSSPVTDRERLAEILKNEAYIPKLLQLFHTCENLENTEGLHHLYEIIKGILFLNEACLFEIMFSDECIMDVVGCLEYDPALDQPKRHRDFLTNDAKFKEVIPITNSELRQKIHQTYRLQYIYDILLPVPSIFEDNFLSTLTTFIFSNKAEIVSMLQKDHKFLYEVFAQLKDETTHDDRRCELLFFFKELCSFSQALQPQSKDALFETLIQLGVLPALKIVMIRDDLQVRSAAAVICAYLVEYSPSRIREFIISEAHVCKDIYLFINVIIKQMICDTDPELGGAVHLMVVLHTLLDPRNMLTTPEKSERSEFLHFFYKHCMHKFTAPLLAATSEHNCEEDDIAGYDKSKNCPNDNQTAQLLALILELLTFCIQHHTFYIRSYILNKDLLRKALILMNSKHTHLILCVLRFMRRMICLNDEAYNNYIIKGNLFEPVVNALLDNGTRYNMLNSAILELFEYIRVENIKPLVSHIVEKFYNTLESIEYVQTFKGLKIKYEKERDRQSQIQKNLHSVLQNIVVFRGTIEEIGLEEEICFMEDAGEAVMPPLEDDDEFMETKRTQEGEAVMPPLEDDDKFTETKRTHQEGEAVMPPLEDDDEFMETKRNQEHEGKVDSPKRTSSGDFKFSSSYSACAAIGTGSPSGSSVVRLVDHPDDEEEKEEDEEEKEEDKEDETSPKKKPHLSS

SEQ ID NO: 4931 - protein, 250 aa, Homo sapiens
MFHGTVTEELTSHEEWSHYNENIREGQKDFVFVKFNGLHLKSMENLQSCISLRVCIFSNNFITDIHPLQSCIKLIKLDLHGNQIKSLPNTKFWNGLKNLKLLYLHDNGFAKLKNICVLSACPTLIALTMFDCPVSLKKGYRHVLVNSIWPLKALDHHVISDEEIIQNWHLPERFKACNHRLFFNFCPALRKGTTYEEEINNIKHITSKINAILAHNSPVLIVQRWIRGFLVRKNLSPVFFHKKKTAGKNY

SEQ ID NO: 4932 - protein, 788 aa, Homo sapiens
MACLTHRNETDARMEFYSLFHKGNKAGVQWHDLGSLQPLPPRFKRFSCLSLQSSWDYSLSKFDERCCFLYVHDNSDDFQIYFSTEEQCSRFFSLVKEMITNTAGSTVELEGETDGDTLEYEYDHDANGERVVLGKGTYGIVYAGRDLSNQVRIAIKEIPERDSRYSQPLHEEIALHKYLKHRNIVQYLGSVSENGYIKIFMEQVPGGSLSALLRSKWGPMKEPTIKFYTKQILEGLKYLHENQIVHRDIKGDNVLVNTYSGVVKISDLGTSKRLAGVNPCTETFTGTLQYMAPEIIDQGPRGYGAPADIWSLGCTIIEMATSKPPFHELGEPQAAMFKVGMFKIHPEIPEALSAEARAFILSCFEPDPHKRATTAELLREGFLRQVNKGKKNRIAFKPSEGPRGVVLALPTQGEPMATSSSEHGSVSPDSDAQPDALFERTRAPRHHLGHLLSVPDESSALEDRGLASSPEDRDQGLFLLRKDSERRAILYKILWEEQNQVASNLQECVAQSSEELHLSVGHIKQIIGILRDFIRSPEHRVMATTISKLKVDLDFDSSSISQIHLVLFGFQDAVNKILRNHLIRPHWMFAMDNIIRRAVQAAVTILIPELRAHFEPTCETEGVDKDMDEAEEGYPPATGPGQEAQPHQQHLSLQLGELRQETNRLLEHLVEKEREYQNLLRQTLEQKTQELYHLQLKLKSNCITENPAGPYGQRTDKELIDWLRLQGADAKTIEKIVEEGYTLSDILNEITKEDLRYLRLRGGLLCRLWSAVSQYRRAQEASETKDKA

SEQ ID NO: 4933 - protein, 266 aa, Homo sapiens
MLINVISGSSYMIHSTQLIENAELRFHTDEQLMTLFMQLQTAVRSRMHPFYITHIRAHTPLPGPLTAGNQMADRLVATAISNARHFHNLTRVNASGLKRRYSSTRKEAKAIIQRCPTCQMVHSSSFTGGVNPRRLEPNSLWEMDVTHVPSFGRLAYVHACVDTFSLWAACQSGESSAYVKRHLLQCFVVIGILASIKTDNAPGYTSQALATFFSIRNIKHITGIPYNSQGQAIVERMNLSLKQQLQKQKGENRDYGTPHMQLNRII

SEQ ID NO: 4934 - protein, 279 aa, Homo sapiens
MGTSCLPDTFTKLINPQENTCSLEEFVLQLELSGYSPEDLTAALEILEAIIATGCFGIDKEELRRRFSALEKAGGGRTRTFADCIQALLEQHQVLEVGGNTARLVAMGSAWPWLLHSVRLKDREDADIQREDPQARPLEGSSSEDSPPEGQAPPSHSPRGTKRRASWASENGETDAEGTQMTPAKRPALQDSNLAPSLGPGAEDGAEAQAPSPPPALEDTAAAGAAQEDQEGVGEFSSPGQEQLSGQAQPPEGSEDPRGTARLVPHPTSPHPGFPSPPP

SEQ ID NO: 4935 - protein, 325 aa, Homo sapiens
MPSRILDKELLSGIPDTERLSEVVDNRAPQRDPTHRAPQRDPTHRAPQRDPTHRAPQRDPTHRAPQRDPTHRAPQRDPTHRPPQRDPTHRAPQRDPTHRAPQRDPTHRAPQRGPRHRAPQRSPRHRAPQRDPTHRAPQRGPRHRAPQRDPTHRAPQRGPRHRAPQRGPTHRAPQRGPRHRAPQRGPRHRAPQRGPTHRAPQRDPGWRAPQRGPTHRAPQRILDAEPVSGFLDAESLSGILVVERLSGILDAERLSGILDTERLSLVLHTERLSGILVGERLSGVLHTERLSGILVGERLSGILDTERLSGILDTEPLSESQIHSA

SEQ ID NO: 4936 - protein, 378 aa, Homo sapiens
MMLSRKLPVHVDDPLSTTLFSSQLNRRISNMDDKVYKMSRALAEIKKRFQKTVTQFINSILLAAGLFTIEYPTKKEEEEFVRFKMRSRTHPERLPKLSLYSGESLLRSQSGHLESSIAETLKDEPESAPVSPVRKTTKIHTKAKVTSRGKAREGRSPTRWAALPSDCPLVLRKLMLKEDTRAGCKCLVKAPLVSDVELERFLLAPRDPSQVLVFGIISSQNYTSTGQLQWLLNTLYNHQQRGRGSPCIQCRYDSYRLLQYDLDSPLQEDPPLMVKKNSVVQGMILMFAGGKLIFGGRVLNGYGLSKQNLLKQIFRSQQDYKMGYFLPDDYKFSVPNSVLSLEDSESVKKAESEDIQGSSSSLALEDYVEKELSLEAEK

SEQ ID NO: 4937 - protein, 455 aa, Homo sapiens
MGVIISGSLPPFSSPLQVGPVSLLAIGVLTVHCMVILLNCAQHLSQRLQKTFVNYGEATMYGLETCPNTWLRAHAVWGRWNLALSPRLECSGKISAHCNPHLQGSSNSPAQASRVAGIYRYTVSFLLVITQLGFCSVYFMFMADNLQQMVEKAHVTSNICQPREILTLTPILDIRFYMLIILPFLILLVFIQNLKVLSVFSTLANITTLGSMALIFEYIMEGIPYPSNLPLMANWKTFLLFFGTAIFTFEGVGMVLPLKNQMKHPQQFSFVLYLGMSIVIILYILLGTLGYMKFGSDTQASITLNLPNCWLYQSVKLMYSIGIFFTYALQFHVPAEIIIPFAISQVSESWALFVDLSVRSALVCLTCVSAILIPRLDLVISLVGSVSSSALALIIPALLEIVIFYSEDMSCVTIAKDIMISIVGLLGCIFGTYQALYELPQPISHSMANSTGVHA

SEQ ID NO: 4938 - protein, 162 aa, Homo sapiens
MSITRLHEQKLVQHVVSQNCDGLHLRSGLPRTAISELHGNMYIEVSSPAGTQGLHGQAGPTHCALLPLGLYLLRSQQGVRAGVRCDGAHCPPQTPDRPDLPQVWDPAAGHHCALWGEGDVGAASELGSGDRGCQQSRHHPVSRVQPEGSKEVPTPLVHDQAP

SEQ ID NO: 4939 - protein, 567 aa, Homo sapiens
MDDKDIDKELRQKLNFSYCEETEIEGQKKVEESREASSQTPEKGEVQDSEAKGTPPWTPLSNVHELDTSSEKDKESPDQILRTPVSHPLKCPETPAQPDSRSKLLPSDSPSTPKTMLSRLVISPTGKLPSRGPKHLKLTPAPLKDEMTSLALVNINPFTPESYKKLFLQSGGKRKIRGDLEEAGPEEGKGGLPAKRCVLRETNMASRYEKEFLEVEKIGVGEFGTVYKCIKRLDGCVYAIKRSMKTFTELSNENSALHEVYAHAVLGHHPHVVRYYSSWAEDDHMIIQNEYCNGGSLQAAISENTKSGNHFEEPKLKDILLQISLGLNYIHNSSMVHLDIKPSNIFICHKVQSESSGVIEEVENEADWFLSANVMYKIGDLGHATSINKPKVEEGDSRFLANEILQEDYRHLPKADIFALGLTIAVAAGAESLPTNGAAWHHIRKGNFPDVPQELSESFSSLLKNMIQPDAEQRPSAAALARNTVLRPSLGKTEELQQQLNLEKFKTATLERELREAQQAQSPQGYTHYGDTGVSGTHTGSRSTKRLVGGKSARSSSFTSGEREPLH

SEQ ID NO: 4940 - protein, 140 aa, Homo sapiens
MDFIVAASNLRAENYDIPSADRHKSKLIAGKIIPAIATTTAAVVGLVCLELYKVVQGHRQLDSYKNGFLNLALPFFGFSEPLAAPRHQYYNQEWTLWDRFEVQGLQPNGEEMTLKQFLDYFKVRPLPYSVTPPQGARCTR

SEQ ID NO: 4941 - protein, 477 aa, Homo sapiens
MSAAPGLLHQELSCPLCLQLFDAPVTAECGHSFCRACLGRVAGEPAADGTVLCPCCQAPTRPQALSTNLQLARLVEGLAQVPQGHCEEHLDPLSIYCEQDRALVCGVCASLGSHRGHRLLPAAEAHARLKTQLPQQKLQLQEACMRKEKSVAVLEHQLVEVEETVRQFRGAVGEQLGKMRVFLAALEGSLDCEAERVRGEAGVALRRELGSLNSYLEQLRQMEKVLEEVADKPQTEFLMKYCLVTSRLQKILAESPPPARLDIQLPIISDDFKFQVWRKMFRALMPALEELTFDPSSAHPSLVVSSSGRRVECSEQKAPPAGEDPRQFDKAVAVVAHQQLSEGEHYWEVDVGDKPRWALGVIAAEAPRRGRLHAVPSQGLWLLGLREGKILEAHVEAKEPRALRSPERRPTRIGLYLSFGDGVLSFYDASDADALVPLFAFHERLPRPVYPFFDVCWHDKGKNAQPLLLVGPEGAEA

SEQ ID NO: 4942 - protein, 505 aa, Homo sapiens
MAVALDSQIDAPLEVEGCLIMKVEKDPEWASEPILEGSDSSETFRKCFRQFCYEDVTGPHEAFSKLWELCCRWLKPEMRSKEQILELLVIEQFLTILPEKIQAWAQKQCPQSGEEAVALVVHLEKETGRLRQQVSSPVHREKHSPLGAAWEVADFQPEQVETQPRAVSREEPGSLHSGHQEQLNRKRERRPLPKNARPSPWVPALADEWNTLDQEVTTTRLPAGSQEPVKDVHVARGFSYRKSVHQIPAQRDLYRDFRKENVGNVVSLGSAVSTSNKITRLEQRKEPWTLGLHSSNKRSILRSNYVKEKSVHAIQVPARSAGKTWREQQQWGLEDEKIAGVHWSYEETKTFLAILKESRFYETLQACPRNSQVYGAVAEWLRECGFLRTPEQCRTKFKSLQKSYRKVRNGHMLEPCAFFEDMDALLNPAARAPSTDKPKEMIPVPRLKRIAISAKEHISLVEEEEAAEDSDDDEIGIEFIRKSEIHGAPVLFQNLSGKNCALFLW

SEQ ID NO: 4943 - protein, 133 aa, Homo sapiens [sequence omitted]

SEQ ID NO: 4944 - protein, 502 aa, Homo sapiens [sequence omitted]

SEQ ID NO: 4945 - protein, 356 aa, Homo sapiens
MVIKQMLIRDPFPSLSLAQIAMDRMKKIKRQLSMTLRGGRGIDKTNGAPEQIGLDESGGGGGSDPGEAPTRAAPGELRSARGPLSSAPEIVHEDLKMGSDGESDQASATSSDEVQSPVRVRMRNHPPRKISTEDINKRLSLPADIRLPEGYLEKLTLNSPIFDKPLSRRLRRVSLSEIGFGKLETYIKLDKLGEGTYATVYKGKSKLTDNLVALKEIRLEHEEGAPCTAIREVSLLKDLKHANIVTLHDIIHTEKSLTLVFEYLDKDLKQYLDDCGNIINMHNVKVGVGQEAGAQGGPHSPTPTHKSPRNGLFPLAFFARSPWRALGPCPLLCDKALGLVSVFGRGAVPAGGRASG

SEQ ID NO: 4946 - protein, 126 aa, Homo sapiens [sequence omitted]

SEQ ID NO: 4947 - protein, 141 aa, Homo sapiens [sequence omitted]

SEQ ID NO: 4948 - protein, 152 aa, Homo sapiens
MGFHYVGQAGLELLTSGDPLASAFQSAGIIGVSHRTWGGYCLKKKSPDSDPLSTWRTSTGRKQMLQIFKYPDGFGSQGERDLTSVYHPTLSTKVTINTKSIAWATGKKAFICINVCVYIHCFFFFKRLGLPLSPRLEHSGTIIAHCSLQRCG

SEQ ID NO: 4949 - protein, 168 aa, Homo sapiens [sequence omitted]

SEQ ID NO: 4950 - protein, 151 aa, Homo sapiens
MGLGGVSREAGLLLLSSPCPDPSVCLSDKPVPEESEGPGSPPPYKMIQTIGLSVGAAVAYIIAVLGLMFYCKKRCKAKRLQKQPEGEEPEMECLNGGPLQNGQPSAEIQEEVALTSLGSGPAATNKRHSTSDKMHFPRSSLQPITTLGMLP

SEQ ID NO: 4951 - protein, 182 aa, Homo sapiens
MLPTAAGFSIWGQVGAAREAPRCQTKISSCSCPTSSVSAAHGPGPNERARGLGGLPDPALSPRVPFQGYARIVFAIISFYFMPCCPLTASSFYLLSGLLDAFDGHAARALNQGTRFGAMLDMLTDRCSTMCLLVNLALLYPGATLFFQISMSLDVASHWLHLHRSAAILGAWATWRHYSGVG

SEQ ID NO: 4952 - protein, 258 aa, Homo sapiens [sequence omitted]

SEQ ID NO: 4953 - protein, 149 aa, Homo sapiens [sequence omitted]

SEQ ID NO: 4954 - protein, 602 aa, Homo sapiens
MESQATSASINNSNPSTSEQASDTASAVTSSQPSTVSETSATLTSNSTTGTSIGDDSRRTTSSAVTETGPPAMPRLPSCCPQHSPCGGSSQNHHALGHPHTSCFQQHGHHFQHHHHHHHTPHPAVPVSPSFSDPACPVERPPQVQAPCGANSSSGTSYHEQQALPVDLSNSGIRSHGSGSFHGASAFDPCCPVSSSRAAIFGHQAAAAAPSQPLSSIDGYGSSMVAQPQPQPPPQPSLSSCRHYMPPPYASLTRPLHHQASACPHSHGNPPPQTQPPPQVDYVIPHPVHAFHSQISSHATSHPVAPPPPTHLASTAAPIPQHLPPTHQPISHHIPATAPPAQRLHPHEVMQRMEVQRRRMMQHPTGLFVFCVSRRAHERPPPHPHRMHPNYGHGHHIHVPQTMSSHPRQAPERSAWELGIEAGVTAATYTPGALHPHLAHYHAPPRLHHLQLGALPLMVPDMAGYPHIRYISSGLDGTSFRGPFRGNFEELIHLEERLGNVNRGASQGTIERCTYPHKYKKVTTDWFSQRKLHCKQDGEEGTEEDTEEKCTICLSILEEGEDVRRLPCMHLFHQVCVDQWLITNKKCPICRVDIEAQLPSES

SEQ ID NO: 4955 - protein, 116 aa, Homo sapiens
MVSGMGMGNRDTNPNGKPLAKQPPEFVLIVYSQSLATAHTLFFSYKQKELSLSAMNPAIPRKKANALASSPVRATHSISTFCMLKLCHRRRASAHDQFFFWSIGSFCLRIFVCVYL

SEQ ID NO: 4956 - protein, 376 aa, Homo sapiens [sequence omitted]

SEQ ID NO: 4957 - protein, 109 aa, Homo sapiens
MYPALLVPSSSPSSVFGVPETGFSQWPGPQGNCRVIQSGSASLQGPLPGRASWHPAIGGPDTPARDPATQEVPTPSQSDPGPRADRSPPLKRLLPLYPTPRDSFHSGIS

SEQ ID NO: 4958 - protein, 363 aa, Homo sapiens
MPVRTLFPESWLWRKFTLPKSKSGISHYPISVKVPDSITTWQFVVVSLKAGQGLCVSDPFELTVMKSFFVDLKLPSSVIRNEQVQIQAMLYNFRDRQAKVRVEFPHKETLCSASKPGAPSHQAGVQIQQTSYSIVLEPQGQTQTKLVPRQEFLNMVPDTEAEVFISVQGYTQMLTHRSSDGTYHTSKGNPGSTWLTSYVFRVFALAYSMMTTQVLSLSSLCDMANWIIIDRQAEDGHFLEKGPVVMTSMQDGYQGSEEDVSLTALVLIALNEGKELCRQKNLMASIERARGFLERKLPDIQTTFAVAIASYALALANSSQANDCLDSFASPSGCGMLLNQPQSWSGEGVISNPAMCYSSLSVS

SEQ ID NO: 4959 - protein, 359 aa, Homo sapiens [sequence omitted]

SEQ ID NO: 4960 - protein, 508 aa, Homo sapiens [sequence omitted]

SEQ ID NO: 4961 - protein, 1264 aa, Homo sapiens [sequence omitted]

SEQ ID NO: 4962 - protein, 633 aa, Homo sapiens
MESGPKMLAPVCLVENNNEQLLVNQQAIQILEKISQPVVVVAIVGLYRTGKSYLMNHLAGQNHGFPLGSTVQSETKGIWMWCVPHPSKPNHTLVLLDTEGLGDVEKGDPKNDSWIFALAVLLCSTFVYNSMSTINHQALEQLHYVTELTELIKAKSSPRPDGVEDSTEFVSFFPDFLWTVRDFTLELKLNGHPITEDEYLENALKLIQGNNPRVQTSNFPRECIRRFFPKRKCFVFDRPTNDKDLLANIEKVSEKQLDPKFQEQTNIFCSYIFTHARTKTLREGITVTGNRLGTLAVTYVEAINSGAVPCLENAVITLAQRENSAAVQRAADYYSQQMAQRVKLPTDTLQELLDMHAACEREAIAIFMEHSFKDENQEFQKKFMETTMNKKGDFLLQNEESSVQYCQAKLNELSKGLMESISAGSFSVPGGHKLYMETKERIEQDYWQVPRKGVKAKEVFQRFLESQMVIEESILQSDKALTDREKAVAVDRAKKEAAEKEQELLKQKLQEQQQQMEAQDKSRKENIAQLKEKLQMEREHLLREQIMMLEHTQKVQNDWLHEGFKKKYEEMNAEISQFKRMIDTTKNDDTPWIARTLDNLADELTAILSAPAKLIGHGVKGVSSLFKKHKLPF

SEQ ID NO: 4963 - protein, 779 aa, Homo sapiens [sequence omitted]

SEQ ID NO: 4964 - protein, 353 aa, Homo sapiens [sequence omitted]

SEQ ID NO: 4965 - protein, 606 aa, Homo sapiens
MCLEKRYLDVLSDVTGPQVSCYITAPSYVLQQLECRIINHMSSLIVGDNEELVSNVITIECSDKEKRVPFPIGIAIPFTARYRGNYRDIMVKVCDINLQSSYLNPNSLEGMKGGYKGTCASVKVYKLGIFSVVSCLKKESFTVTKKGLALKSSMDSRISLNYPPGVFTSPVLVQLKIQPVDPALVAHLKAQQDTFYSVQSTSPLIHIQHPSTYPFQKPVTLFLPCSPYLDKNNLGSEIDHKRRASATINRITPSYFNRTKIASIRKPRKNASECLKLLGFRSQDSGWCGLDDVVKTIQSGLVSVELYEHLERFIVLHLSSTMDNSHLVTFVKSLEEAMLSTTACIVLSHQKDNPHRIAVLVVPSKDLSQVLKDLHLEGFGGPPEPSRHFQVREGEQLLLRFTGNIFASSNGKDYGKDYTLIFHLQRKPRLELQIKEVDEFGNYSCPHYKGTIVVYKVPKGKIVPNLNQSLVINENHSQLPICKLPLKLPKHKKLINHPQSTKRVSKDPVEALWDNLLHWLAEELSEENAESLSSTLPLRRSTIQLIKLKNPDDLTEQIHEFLCFWKKSLPTFTDKLRLLARHLRKIGRSDLAEELKFKWENKVFTE

SEQ ID NO: 4966 - protein, 151 aa, Homo sapiens
MATITMQAYSRGFLARRRYRKMLEEHKAVILQKYARAWLARRRFQSIRRFVLNIQLTYRVQRLQKKLEDQNKENHGLVEKLTSLAALRAGDVEKIQKLEAELEKAATHRRNYEEKGKRYRDAVEEVSCGRVRRDGNMRTLCEKDERCQLFL

SEQ ID NO: 4967 - protein, 731 aa, Homo sapiens
MMQAQESLTLEDVAVDFTWEEWQFLSPAQKDLYRDVMLENYSNLVAVGYQASKPDALSKLERGEETCTTEDEIYSRICSEIRKIDDPLQHHLQNQSIQKSVKQCHEQNMFGNIVNQNKGHFLLKQDCDTFDLHEKPLKSNLSFENQKRSSGLKNSAEFNRDGKSLFHANHKQFYTEMKFPAIAKPINKSQFIKQQRTHNIENAHVCSECGKAFLKLSQFIDHQRVHTGEKPHVCSMCGKAFSRKSRLMDHQRTHTELKHYECTECDKTFLKKSQLNIHQKTHMGGKPYTCSQCGKAFIKKCRLIYHQRTHTGEKPHGCSVCGKAFSTKFSLTTHQKTHTGEKPYICSECGKGFIEKRRLTAHHRTHTGEKPFICNKCGKGFTLKNSLITHQQTHTGEKLYTCSECGKGFSMKHCLMVHQRTHTGEKPYKCNECGKGFALKSPLIRHQRTHTGEKPYVCTECRKGFTMKSDLIVHQRTHTAEKPYICNDCGKGFTVKSRLIVHQRTHTGEKPYVCGECGKGFPAKIRLMGHQRTHTGEKPYICNECGKGFTEKSHLNVHRRTHTGEKPYVCSECGKDLTGKSMLIAHQRTHTGEKPYICNECGKGFTMKSTLSIHQQTHTGEKPYKCNECDKTFRKKTCLIQHQRFHTGKTSFACTECGKFSLRKNDLITHQRIHTGEKPYKCSDCGKAFTTKSGLNVHQRKHTGERPYGCSDCGKAFAHLSILVKHRRIHR

SEQ ID NO: 4968 - protein, 1186 aa, Homo sapiens
MYQALEQGGMTFGWVCWMILFDSSLYFLCGWYLSNLIPGTFGLRKPWYFPFTASYWKSVGFLVEKRQYFLSSSLFFFNENFDNKGSSLQNREGELEGSAPGVTLVSVTKEYEGHKAVVQDLSLTFYRDQITALLGTNGAGKTTIISMLTGLHPPTSGTIIINGKNLQTDLSRVRMELGVCPQQDILLDNLTVREHLLLFASIKAPQWTKKELHQQVNQTLQDVDLTQHQHKQTRALSGGLKRKLSLGIAFMGMSRTVVLDEPTSGVDPCSRHSLWDILLKYREGRTIIFTTHHLDEAEALSDRVAVLQHGRLRCCGPPFCLKEAYGQGLRLTLTRQPSVLEAHDLKDMACVTSLIKIYIPQAFLKDSSGSELTYTIPKDTDKACLKGLFQALDGNLHQLHLTGYGISDTTLEEVFLMLLQDSNKKSHIALGTESELQNHRPTGHLSGYCGSLARPATVQGVQLLRAQVAAILARRLRRTLRAGKSTLADLLLPVLFVALAMGLFMVRPLATEYPPLRLTPGHYQRAETYFFSSGGDNLDLTRVLLRKFRDQDLPCADLNPRQKNSSCWRTDPFSHPEFQDSCGCLKRPNRSASAPYLTNHLGHTLLNLSGFNMEEYLLAPSEKPRLGGWSFGLKIPSEAGGANGNISKPPTLAKVWYNQKGFHSLPSYLNHLNNLILWQHLPPTVDWRQYGITLYSHPYGGALLNEDKILESIRQCGVALCIVLGFSILSASIGSSVVRDRVIGAKRLQHISGLGYRMYWFTNFLYDMLFYLVSVCLCVAVIVAFQLTAFTFRKNLAATALLLSLFGYATLPWMYLMSRIFSSSDVAFISYVSLNFIFGLCTMLITIMPRLLAIISKAKNLQNIYDVLKWVFTIFPQFCLGQGLVELCYNQTKYDLTHNFGIDSYVSPFEMNFLGWIFVQLASQGTVLLLLRVLLHWDLLRWPRGHSTLQGTVKSSKDTDVEKEEKRVFEGRTNGDILVLYNLSKHYRRFFQNIIAVQDISLGIPKGECFGLLGVNGAGKSTTFKMLNGEVSLTSGHAIIRTPMGDAVDLSSAGTAGVLIGYCPQQDALDELLTGWEHLYYYCSLRGIPRQCIPEVAGDLIRRLHLEAHADKPVATYSGGTKRKLSTALALVGKPDILLLDEPSSGMDPCSKRYLWQTIMKEVREGCAAVLTSHRFWYQDDAGLIK

SEQ ID NO: 4969 - protein, 140 aa, Homo sapiens [sequence omitted]

SEQ ID NO: 4970 - protein, 177 aa, Homo sapiens
MSSETPTSRQLSEYLKHAKGRTRTAIRNGQVWEESLKRLRQKASLTNVTDPSLDLTSLSLEVGCGAPAPVVRCDPCSPYRTITGDCNNRWRGLGCGGRPFQPLRPALPRPLSLGHSRQICHCLAHLGWRSHLPHLLKIARLQPSPSSPLCVSGSGTFPRGGGAPRLQGVGAVQRPQI

SEQ ID NO: 4971 - protein, 930 aa, Homo sapiens
MAGAAAAVAAGAAAGAAAAAVSVAAPGRASAPPPPPPVYCVCRQPYDVNRFMIECDICKDWFHGSCVGVEEHHAVDIDLYHCPNCAVLHGSSLMKKRRNWHRHDYTEIDDGSKPVQAGTRTFIKELRSRVFPSADEIIIKMHGSQLTQRYLEKHGFDVPIMVPKLDDLGLRLPSPTFSVMDVERYVGGDKVIDVIDVARQADSKMTLHNYVKYFMNPNRPKVLNVISLEFSDTKMSELVEVPDIAKKLSWVENYWPDDSVFPKPFVQKYCLMGVQDSYTDFHIDFGGTSVWYHVLWGEKIFYLIKPTDENLARYESWSSSVTQSEVFFGDKVDKCYKCVVKQGHTLFVPTGWIHAVLTSQDCMAFGGNFLHNLNIGMQLRCYEMEKRLKTPDLFKFPFFEAICWFVAKNLLETLKELREDGFQPQTYLVQGVKALHTALKLWMKKELVSEHAFEIPDNVRPGHLIKELSKVIRAIEEENGKPVKSQGIPIVCPVSRSSNEATSPYHSRRKMRKLRDHNVRTPSNLDILELHTREVLKRLEMCPWEEDILSSKLNGKFNKHLQPSSTVPEWRAKDNDLRLLLTNGRIIKDERQPFADQSLYTADSENEEDKRRTKKAKMKIEESSGVEGVEHEESQKPLNGFFTRVKSELRSRSSGYSDISESEDSGPECTALKSIFTTEESESSGDEKKQEITSNFKEESNVMRNFLQKSQKPSRSEIPIKRECPTSTSTEEEAIQGMLSMAGLHYSTCLQRQIQSTDCSGERNSLQDPSSCHGSNHEVRQLYRYDKPVECGYHVKTEDPDLRTSSWIKQFDTSRFHPQDLSRSQKCIRKEGSSEISQRVQSRNYVDSSGSSLQNGKYMQNSNLTSGACQISNGSLSPERPVGETSFSVPLHPTKRPASNPHLSATRQQKVNVQKKEWQQPNNVLGRSLS

SEQ ID NO: 4972 - protein, 755 aa, Homo sapiens [sequence omitted]

SEQ ID NO: 4973 - protein, 268 aa, Homo sapiens
MAAAITDMADLEELSRLSPLPPGSPGSAARGRAEPPEEEEEEEEEEEEAEAEAVAALLLNGGSGGGGGGGGGGVGGGEAETMSEPSPESASQAGEDEDEEEDDEEEEDESSSSGGGEEESSAESLVGSSGGSSSDETRSLSPGAASSSSGDGDGKEGLEEPKGPRGSQGGGGGGSSSSSVVSSGGDEGYGTGGGGSSATSGGRRGSLEMSSDGEPLSRMDSEDSISSTIMDVDSTISSGRSTPAMMNGQGSTTSSSKNIAYNCCWDQC

SEQ ID NO: 4974 - protein, 160 aa, Homo sapiens
MLGERPLCLTPGAKLGLHHWIIRCFQRRPSPHPDQGNWDDVGPLTLSDMQPGWRLGQPPCRSESFSPCHLKSKSLLTQALPGMCSPATEPEAALLLSPVGTAFQTQNTEFTASFGIFPNRLTVPIASDPFQYSCTRNVMVKNKKPPVMEGRNMNQLKAFH

SEQ ID NO: 4975 - protein, 411 aa, Homo sapiens
MTEMSEKENEPDDAATHSPPGTVSALQETKLQRFKRSLSLKTILRSKSLENFFLRSGSELKCPTEVLLTPPTPLPPPSPPPTASDRGLATPSPSPCPVPRPLAALKPVRLHSFQEHVFKRASPCELCHQLIVGNSKQGLRCKMCKVSVHLWCSEEISHQQCPGKTSTSFRRNFSSPLLVHEPPPVCATSKESPPTGDSGKVDPVYETLRYGTSLALMNRSSFSSTSESPTRSLSERDELTEDGEGSIRSSEEGPGDSASPVFTAPAESEGPGPEEKSPGQQLPKATLRKDVGPMYSYVALYKFLPQENNDLALQPGDRIMLVDDSNEDWWKGKIGDRVGFFPANFVQRVRPGENVWRCCQPFSGNKEQGYMSLKENQICVGVGRSKDADGFIRVSSGKKRGLVPVDALTEI

SEQ ID NO: 4976 - protein, 129 aa, Homo sapiens [sequence omitted]

SEQ ID NO: 4977 - protein, 156 aa, Homo sapiens
MQTEDIRLEPDLYEACKSDIKNFCSAVQYGNAQIIECLKENKKQLSTRCHQKVFKLQETEMMDPELDYTLMRVCKQMIKRFCPEADSKTMLQCLKQNKNSELMDPKCKQMITKRQITQNTGKILAWLSWPRGVSEKEFSGCRVTCSNSQGFVAWEF

SEQ ID NO: 4978 - protein, 183 aa, Homo sapiens
MELAALGLSPCPRLLHAELLPGLLTVFSLRFLQDYGGYLSTYILPAKGENQGQTFTCGSALSPITDFKLYASAFSERYLGLHGTRDNAVPAAAPPPGARETGTPRPLPQGTEQRMVAAGPTRAHRTPAPRFQPPSGSMRPAHTSLCVPVRDITPCLTSQCHGRSSYSTIVLAVRVHIWACYFL

SEQ ID NO: 4979 - protein, 579 aa, Homo sapiens [sequence omitted]

SEQ ID NO: 4980 - protein, 261 aa, Homo sapiens [sequence omitted]

SEQ ID NO: 4981 - protein, 281 aa, Homo sapiens
MAEAAPARDPETDKHTEDQSPSTPLPQPAAEKNSYLYSTEITLWTVVAAIQALEKKVDSCLTRLLTLEGRTGTAEKKLADCEKTAVEFGNQLEGKWAVLGTLLQEYGLLQRRLENVENLLRNRNFWILRLPPGSKGEAPKVPVTFDDVAVYFSELEWGKLEDWQKELYKHVMRGNYETLVSLDYAISKPDILTRIERGEEPCLDRWGQEKGNEVEVGRPRMMGTGLPPYPEHLTSPLSPAQEELKEGQAPKQQQDSEARVAPAGPEAGLALRTDLQGEAQI

SEQ ID NO: 4982 - protein, 126 aa, Homo sapiens
MSPPPLLFPGPSHHHVSPGLLHAPPTWSPHFCPGRGWCVLHPATQQSEGSSYNISQITSLFAQNPAMAPISFRVNSKAPYLPTAPHSRTFPPVVLPLVPSIPATGISLLAPELTRYGAASGPLHLQ

SEQ ID NO: 4983 - protein, 266 aa, Homo sapiens
MVMADQNQVWVGSEDSVIYIINVHSMSCNKQLTAHCSSVTDLIVQDGQEAPSNVYSCSMDGMVLVWNVSTLQVTSRFQLPRGGLTSIRLHGGRLWCCTGNSIMVMKMNGSLHQELKIEENFKDTSTSFLAFQLLPEEEQLWAACAGRSEVYIWSLKDLAQPPQRVPLEDCSEINCMIRVKKQVGWRARHPQHPRQVSLALAASPCSREPAARPRALLPSPLRVPLLTGTCRVGANGPTGHHVLVSWCGPSTPQRIPPNWMASNDRT

SEQ ID NO: 4984 - protein, 251 aa, Homo sapiens
MGMGTLAWGQPLLPRCLCPRAGQRQPVVTAAVAAPQLTMNDFSVHRIIGRGGFGEVYGCRKADTGKMYAMKCLDKKRIKMKQGETLALNERIMLSLVSTGDCPFIVCMSYAFHTPDKLSFILDLMNGGDLHYHLSQHGVFSEADMRFYAAEIILGLEHMHNRFVVYRDLKVSAPAVPRLDLRGCPLLPLDIPATRPRGVGLLGHGRPVSSHLRPCPSHRATLWVQVVAGDRREDPHLCPFFGYPSSSPVKQ

SEQ ID NO: 4985 - protein, 350 aa, Homo sapiens
MMESSELTPKQEIFKGSESSNSTSGGLFGVVPGGTETGDVCEDTFKELEGQPSNEEGSRLESDFLEIIDEDKKKSTKDRYEEYKEVEEHPPLSSSPVEHEGVLKGQKSYRCDECGKAFYWSSHLIGHRRIHTGEKPYECNECGKTFRQTSQLIVHLRTHTGEKPYECSECGKAYRHSSHLIQHQRLHNGEKPYKCNECAKAFNQSSKLFDHQRTHTGEKPYECKECGAAFSRSKNLVRHQFLHTGKKPYKCNECGRAFCSNRNLIDHQRTHTGEKPYKCNECGKAFSRSKCLIRHQSLHTGEKPYKCSECGKAFNQISQLVEHERIHTGEKPFKCSECGKAFGLSKCLIR

SEQ ID NO: 4986 - protein, 191 aa, Homo sapiens
MYAKRPESFSCKKLAMSKKVTPASTQCVRFPFPSTVVCKKNLDSTTVAVHGEEIYCKSCYGKKYGPKGYGYGQGAGTLSTDKGESLGIKHEEAPGHRPTTNPNASKFAQKIGGSERCPRCSQAVYAAEKVIGAGKSWHKACFRCAKCGKGLESTTLADKDGEIYCKGCYAKNFGPKGFGFGQGAGALVHSE

SEQ ID NO: 4987 - protein, 482 aa, Homo sapiens [sequence omitted]

SEQ ID NO: 4988 - protein, 465 aa, Homo sapiens [sequence omitted]

SEQ ID NO: 4989 - protein, 134 aa, Homo sapiens
MGKKQSRKTGNSKKQSASPPPKECSSSPATEQSWMENDFDELREAGFRRSNYSELREDIQTKGKKVENFEKNLEECITRITNTEKCLKELMELKTKARELREECRSLRSRCDQLEERVSAMEDEMNEMKQEGKV

SEQ ID NO: 4990 - protein, 589 aa, Homo sapiens
MNNRKEDMEITSHYRHLLRELNEQRQHGVLCDVCVVVEGKVFKAHKNVLLGSSRYFKTLYCQVQKTSEQATVTHLDIVTAQGFKAIIDFMYSAHLALTSRNVIEVMSAASFLQMTDIVQACHDFIKAALDISIKSDASDELAEFEIGASSSSSTEALISAVMAGRSISPWLARRTSPADSSGDSAIASCHDGGSSYGKEDQEPKADGPDDVSSQPLWPGDVGYGPLRIKEEQVSPSQYGGSELPSAKDGAVQNSFSEQSAGDAWQPTGRRKNRKNKETVRHITQQVEDDSRASSPVPSFLPTSGWPFSSRDSNADLSVTEASSSDSRGERAELYAQVEEGLLGGEASYLGPPLTPEKDDALHQATAVANLRAALMSKNSLLSLKADVLGDDGSLLFEYLPRGAHSLSLNEFTVIRKKFKCPYCSFSAMHQCILKRHMRSHTGERPYPCEICGKKFTRREHMKRHTLVHSKDKKYVCKVCSRVFMSAASVGIRHGSRRHGVCTDCAGRGMAGPLDHGGGGGEGSPEALFPGDGPYLEDPEDPRGEAEELGEDDEGLAPEDALLADDKDEEDSPRPRSPPGGPDKDFAWLS

SEQ ID NO: 4991 - RNA, 30 nt, Artificial Sequence
  Description of Artificial Sequence: an artificially synthesized oligo-cap linker sequence
agcaucgagucggccuuguuggccuacugg

SEQ ID NO: 4992 - DNA, 42 bp, Artificial Sequence
  Description of Artificial Sequence: an artificially synthesized oligo(dT) primer sequence
gcggctgaagacggcctatgtggccttttttttttttttttt

SEQ ID NO: 4993 - DNA, 21 bp, Artificial Sequence
  Description of Artificial Sequence: an artificially synthesized primer sequence
agcatcgagtcggccttgttg

SEQ ID NO: 4994 - DNA, 21 bp, Artificial Sequence
  Description of Artificial Sequence: an artificially synthesized primer sequence
gcggctgaagacggcctatgt
